United States Patent Application Publication US 2026/0058010 A1 - sequence listing, part 32

SEQ ID NO: 390 - DNA, 733450 bp, Homo sapiens
  source 1..733450: mol_type = genomic DNA
tattatgacttgtatgttttgtaaatttcccgtacagtttcaagcattctagcattttataattcaattgccatttaatttaaatggacatgctagttaccactgctttcagaagtgtttgcttaactactttaacaattcaatcactttggtgcaagtttaaacaaacagacatgcaaccaagaattcatcctaagtactggttttgaggaacttttttataacctgtggtacttagaattttaccgtgttcccatatcctgggagttaacttgactggcaggtccaattaaatatgaataataacaaaactgattatggtggatttgtatattgacctttttcatttgagaggacaattaaaacgatctgaatatacctcaagatacctaatatttctggtgacttgcaataatctttattgaaaagggaagacctcatgaaatattaaagaaaattatatcattcctttcaaggaacagtcatgcctatttagttttaattcaatactaacagcaagattactgtgtacattttaatttttaaaaattaaaggtttattttttgtctcgtatctgtgcagacatagatatgtacttttctcacagacaaggctggcagtgagaatcacccatgtttttagataatttcgaaagtcctctgaattgtacgtgcctgtgaaaaaaggaaacattaataattggcatcatacctgaggattgtcaggattttgaaagtgtgggatttgtcgttcccaccaaactaccccacagtgtcacacactgcagtctttttaggctgggaggcgagttcaagagctgtttgttgttccgagcttgatccagagaggatcactgtttgacaagttctattttaagtcgtgcctgagtgtgcaggtgtcagcctctttcatggctgtagaaaaagcaccattacactccgtctgtattcttcccccgacaatgcaggatcgcccccccgcccccccgcgcgtttgtttctgctttgccagccactttttctttgggaaattctagggagggcaggcggacaggactgcgaggaagggcgaggaggggcagaaagaggtcgtctgccactcccctaccttacaaggcacgtggcactggcagtagcagcagctggatgcaacaactgagatgaggaacctcctcccagcaagaggatattgagagaaggaggaggtggcagcgaaggcaagacatgcacactgtgtccttccccaaagggagaatccgccctcaagggaaaaaccacaaggaagccactacccgccccgcctctgccagcttgccccagtgtctggcagcagtccccatgcacctgctcacctgtctatccgttcggggtggttgggggagggacgaggggtgtcggggtgggtgggtgggaagagaaggagggcagggcaaaagagggggtgcaccgagggctccgcccccccggaggctgtgcgcaggcgcagtggctgctaccgcaggcagggggcggcaacatggcggagtgagcggcggcgtcggggcttcacaacaacagtggtggccgtagcagcggcggcagcagcgtcaatagcatcggccacagcctgagcttcagcaccggccagcgtcgtggccagctgctcgcgtcctcgggcttctcggagcggctgcagcatctccgcggggggcgggccgggccggacagaccgggagagggagagagcagaggcagcggcggcggcagcggcagcggcagcggcacacctgctgggcgggcacagccgcttgcccggcagcggttagcggtaccgccaccgccgagaataagcctgcggatcccccgccgcctccgcgggggagagcgccggagcgggccgggctgaggcgcaggcggggagcgggcccggcgccgcggcgctggtggatgctggggctccgaggcgacggccggggggcgggggccgaggcaggtataacggtaccggcggcggcagcgccgctgctcttcccttctcctcaggaggggggccaatggctagcgagaagccgggcccgggcccggggctcgagcctcagcccgtggggctcattgccgtcggggccgctggcggaggcggcgggggcagcggtggtggcggcaccgggggcagcgggatgggggagctaaggggggcgtccggctccggctcggtgatgctccccgcggggatgattaacccttcggtgccgatccgcaacatccggatgaaattcgcagtgttgattggactcatacaggtcggagaggtcagcaacagggacatcgtggagacggtgctcaacctggtaaggaaaaggcgtgctctcaatctgcttccccagtccccacatacaccgtccccagcgcctttccctcccacccttcacccccagggtcacacgcgccgcgcgtccctgggagcgcagagcgttcagccggtattgcccagcgggtgacctgcctgcgcgctgctagagccacgccacctccctcctctcctctttctggtcctctcctgccacctgagcgcagtgcccaacttaacaccgcttcttctcactttttaggaccgcgagtaacccagtacccgcggtgaaggttttgggtcgactttagagtttagttaggaggtgaggaggcctcctgttctctggggttctttttctcacacttaattgtccttggtgtcgctctccgaggatgacagccttgcccctggagcctaaattcccccgtgctgctgaaatgtgagaagcgcattagcttccaacttgagcagctggggtgtgatgttttcgaaggagacagaaaatgatgcagttttgcatctgtctttaaatattccaaggccatgatggagagtgttgtgtctgtatccatccccctccatctcagaagcagccgtcccttctttgtaatattgccctgaatatactgatctcttagtcattttttgtgcacacaaggtgtgtgaggacaccaaatcacacaggttgatttctgtggttactttcagtagtgtggcatgtgggtaaagactaaaggaaaggttttaaacgcagccctaggttttggttcctttcatggtaagaaagagttactgcagaagtgtgtatgacttaatgttttgcgctatctacagagaggctcagaagcgtttaagatgtcagggaaagaaatggaaagaaggagaggagaatcatacattgaggataattaacagtagttcatatttagtgctttgtaaatggaggttttgttttgttttgttttgtttttaaatgcagccaagctttttaaacagttttctctgcaatagatctagtctttgacatactgtaaggttgggctttgggaggcaagacataaatcgagagcaatcagttgagtattgtatttggtgtggggtcacaggaatataacaatatgcttacaggggtactttgtaacacccatgcagtcatttttcagctaagcaattatttttacttactctattggaaaactgagagaaagctgcagctacatcagtggtgtcctgagacatgcattagataatgtctacggtttatgaacctcgtaaatgcacagaaaagttgaagctgtttttttccttttgctagtgtgtcaggtcaaaggagattatctgtctttgttatattcattgctgtttaaaacaaaacacctctttttacttttttgtacctttcaaataaatcatcatgaaaagtcagtgtaagtttgagggaatgtcactaagttgatataaccaagttcttttcagaacactactagaaatacagttttcttgagttttaattttaactagctgcaaataagaggtcagtacttgccatttctttttaaaagaagataaatctcaaactgttagtatgttagcaggtaactgtatttctgtaatttaaaggaacacatttttagttgcagttttgatctaaccaatatcatttttaagttagattatattaggctattttagtaagtattcctatgcttacttaatacattttaacctggtaagaggcagtagagctttcacaacctggaaactgatttgaatgtataaccagtttggactctgcagcagtagcaatgtgtgctgaatcagttcttaacagatggggttttttagatatacggtagactaagaaaggaagtgaaatgtttctcttgagataaaaaagaaatttaactcttcagagcaatgaaaatctgacatgaagtttcagtatgcagacgttattttagagaactttaccattaagcttagagtcactagaaataaagtaatactgagatagtatatccccaaatctacctaagattttgtaactgcaatgatatttggaatttaaagagttaggtttaaaatttctttgtatgtatttaaagaatgcaatagatttttaaatagaaacttttggagaaaagaataaatgacaaaaggagctgtttattactaagttgttaattatattaattgtggagtataaattagtcatttgaagtgtaattttcttgaactgtagatttagggctttattgtccaatacactcatgaaaatgtcatatgaaaatttaagtggattctcaaaaatatgtggaagtcatgggcatttaaaaaactgattatcaaacttaattctatttatttagtaagtaaaccaataaaattcatataggacactcagtgactcgttagagtttggaaacctttaatattaaatctaaaatgattttttaaaattttcagttttagtttaacacattaaataaaaatgtaaggtgaaatagtgaaatacctattactgtgccctgaatgacagaaaagaaaggagaactaatgaaacttcaaaaaaaagaggagtttctaccttaaacaatacctttgtctcagtcgcctttgtcagtatatttttctttctttttcctgtttattttttcttcctatgtaaggatactcataaatacttggtttttaggtgctgtttctcacatgccttggccaaagaattaaaagctgggcagagtgaagttttaagcatgcactaaagtgtaggacttcttcaacagagcggtggctgtaatttttctgctttgtttcccaaaggtctagagacctatttttactactaggtggattgtgggagtttggtgaggaatcaccaatgtgatatgatataaaattagtcatttttattagagatgtatgtattttgtataatgatgttatagttgacttaaaacagtgaaatatggaatggataatgttaggaaggtaggtaaattagtttgtgaataaagttacagtcagagtgcattgtcaaggattttgcattgtagctctactaatgaaagaaactgatcgttaacaaagtttggcttctggaggaattatttaaagtggcaatataagagaatttaactacagagaagagattttgttgattgttttcagttgtaaaactggcgtactacctaatctattacttcttttgtaaacacacttaacatatgtttatataagctttatccatatttgaagtaaaagctatgtaagtatcgtgttattgttgcttataacatggaagtttcttttataaacataaatttctagaaaaatatgtttataatagaggattaatatttacttagtgaaagaattcataatttttttggaatggctttcttatgtgtatagtataattctatgattataattatggaatttaattatagacaaattttttatgaataactgaattcatgaaattttttcatgaaattttttcatggatttgtagttttttttcatgagttacagtgagttatatcagtgtgtccagttgtagaaaatgatatttcctctgatttttttttttttttacattctaagtggcatgctgttggctgaactggaagcctaataagatgctttgaagggatttgtggtttaccaaatttctctcatcttggcttatggatcatggtatttttgttaaaagggtaactttaaggttttttttttttttgtacttgaatatggcagtaactcttcttccttagagtttttttaaatttgcagcttgatagtcataattttcattttaaagatatttagaattttacaaacaaggtgtcttctgcatttgaattatatttatttaaaaaatatacagttgcatcttagaatcatggaggtccttaatactaataaaaccacatttatattaaaataatttcctgcattttaatttatgttgatatataagccttttcatattaatttgagttgtattttattctcatgattgggtatggaaaataaaattcaggattcatatgtaaatgctcgaggtttcaatatcttaaggagttttgagattttccttagaaatattaatttagtcacataatgacactaaggcagcaaatattctgtggtcagtcaacgatcaagttatattaattttaaataaatgttttgtgtattgctagctgctttttggtaaatactatgctgctaattaaaaatatctcaaggttctttattcttttgctatacttttcccaaacagtgtgaaataatttattgggtctaacagacccagtgcccgttttgtgtcactggtatagctgtattataaaattcagtcacctgcattttttttttaactatatactgaacatattgttatgcattagttccaggttttccatttcttgtctttatacaatgtcagcatatctctttggcatcacatatcaccctgtagcattgcagttatttatgtgtgtttcccttcctaggctgtgaactccatgagggcaggaattgattttatgtatatttattttttgtatttctaggccttggataagttaagtgcgtttgtagtgtgcaggacactgtattaggcagtaatgattatggtcagtttctgaagttatgttcaacattacggtccagacttaggatcctgaaataaactcatatataaagtcaactcatataaactttatgtatttcttattcctcaaactagaaatatgtgttcaatgtgtatgatattacctgactgtgtaggcattactgcatatgtagatgttattttgaactggcatctgttagtaagttcgaatctggtaaaaacttttcagtaaacttttatgtataatcaaatataatcacataacaaggtcatgttgttaacaaagaaaatacgtaatgcattgaagagaaattgtagaaaatattgttagcatttgtcatattgccaagaatagtggacatctcttgtttttgtgtgtctggcgtacatgtcacctctttgtagtggtacctcagttttcctttgatgactcacttattccccatttgtagttcagctggtttaggtgggtctaccccactgcctgccttgagggtcagacatctaacctaggtgtggcaagaattgtggtgattggttcagggacaaacatttaacccaagggtagcgagccagagtaggttccaggaattgtgctggaaggctttctgatggggatgctgaatgtgtaaattcttaagagttgtaggtccctgtcttagaatttgatcaggtgtaaagcaaacaacctcatgattctgttggagaacctagagttctttatgtctgtggtgattatcttctaaccattaaattatctcctttaaaatttactattgttatttatttcaaatcagtgtaagttgggttttttgtcacttgtaaatagaaggaatccccagtaacatagacattagtatctggaaatgacacattgtaggaaacagaccttagattttgaaatggagtggaaggcagtgagaactttgtggtcctctagcagttccgttttacagagcagctgtttaaattgtcacctgtgttatctttgtcaatggaactactgaggttggaattttagggatgttggaatgttttggtcactttttggggtctttgatacaatgtcttttaagagagcagttaacttcggtccaagttagcatgcttgaaagcaaagcagaaagaaaatgtagcctttccaaggcagagaggctctttctgcctgtagctgccatccaagatagcagagaattagaatattaaagctttgtaggtcataaaggcctaagtttttaccccgtgctaaagttggcaagaggaaagccaagagtttaaatgagaaccaaataaagttctgtctgataagcttctcccaagcctcgcatgcagtatacgccagccttctgaccaaagtaacagtaatccagttgtgaagagctttaaaataggatgcaaccagggagcaagtgatagaatagctgtgcctcctcacccagtttattgtttcacattgcttcaaggaagatcattaagctgacggttaaggggataagagtactgggaaggcctattgctatgagactgaaacttaaaagctgacaagatcctgacaggatctcctgttttggttgcgaattcaactccttttacttaagtaaattgacgaaaaacttaccaaagtttaaggaagccatacttctagagaaacctcaagcctggtaaacaaaggcctgcattcttttacttctaaggcaattctaagctccagcagtgtagctgctagaaggaaaatctgcgttatggaggctaataagtgagatcttctgagatatagtggtagtgaatgtgttcattttggccgacccaaggaattccattagcaaggacagggaattcttgttactctgaccaatgatatatggtttatgctttgaaattagttatcatggtgtttctttaaccttctccagtcttctaagtgcagttattgtttcttaatgttcttttaccattgtatattaattagaagttatagttaaattcattatatagctatataattggtcaggtttgaggtaccaccaagaagaatattgtcataacacaaaaatttcagacttgaggttagatgcagtaatttgtctttgtcttttttcaccctctggtaaggtggtaagtacactttctattgtgtctaagatagccatgttaaacatggatatttaagtagttatatgtatgaaaagaagtgagtgtctgagatgggtgggtagccaaggactctaatgttatagatttctgacggttttggctgcctagcatccattctttctgctgttaacattctcgattttttgatactcttttagggagtcattcttgatttttatggtctggggcttcactggactttatcctgctttcctggaccagacagagaaactgacgtctggcccaacagtaactggtattggttataaaatttagctgcatttctgagacagcttgataacttctttctgaagaaagaaaaaggtgctttcgctggggttgctgaaaatgttagaatgtaagtctagaattgattgcagtctgcaccatgaagtcagattctacttgagaacagagctgttaaagaggcacctaaaaccaagccatacattgctgatggcagctttggatcccctcaagtcagttttatctccagatgtttcagtgcatcattttgccttaagccagtttgagttgggtttctatccatttgtgccccaatattctaaattaaaaaatatttaaatactaatgtttaaattaaatattctaatattctaaattaaaaaatttagaatattctaattttctaaattaaatatttagaaatatttaatttctaatattctaaattaaaaaaattttaaatactttaggtattaaatattacaggacgaagcataagaaaaatgtttacttgtcaaagaacttgatatatttcaagaaagaagaaatatacatgtttaattaatataaaaatactcactttggctaaataagaacataaggcaacagataacatgaaaaggaagtgattaaaaagaaatgaccagctggtcatggtggctcatgcctgtaattccagcactttgggagtctgaggtgggaggattgcttgagccagggagttcaagaccaacctaagcaacaaccctggaggttgagtctgcagtgagctgtgatcacgtcactgcattccagcctgggtgatggagtaagatcctgtctcacaaaaaaagaaatgatgattgtttgctagggcaagttaaaataatcttaaatgctctttctgggctcgtaaactgttacagctattccgagtgacattttaccaatatgtatcaaggattttaaagaggttcctataatttattcttagttctttaggctaaggaaaaaaatacctgtggacaggtatgaaaattaagtgtatttttatgatataacatgtggcaacaacttaaatgttcaacaataggaaaacattaaatatattatttttacatccatgttatgaaataacatacagctattaaaacattctgtgcctcagtttctttgtgtgtaaaatgggatttcaaccttataagatagatatacaggttgtacagattaaatgggttaatatatgtaaagtgcttggtatatagtaaactttagttagtacttactattgttgttttagttattaccttggtcctgagaatcacctgaccatagaaagaagtaatgacctaactgaaagtgatctgtcctattttagcttggagtacctgagcctagtgacctgtcagggaggggactcttaggtacacacagatcatgatctcctgctgaagcacaggacatctgttgtcttgaatcctgcatagtctttatcagtgcctgaggtagtttttctgatttcttactttgcatgaggagggtgagaaactggggatggaagaggcaagaggtaacaccagttcctttgtgtggagtctcttccatctcttctctcacagggctgactttcacatgttgatgtagtaagacatgaatggtgatccaaggcaaatagtaactccctctgggagtatttgcttaaatatttagaagactacttgggtaacaagtctaaggggcaagttaaaggattaaaaactaatttatgactattttagaaactaacattagcctatagtttaatagctcttaactatttacagtacacttgcggaattgaacacagcagtgtcctctaaccctcagaataatttccttttatagataccattcctgctttacatatgtagaaactaaggctgtagaaaatgtgaagtaattagacaaggttatctaggtactaagtagcacagctgggactcagaccttcaggttccaaagctagagttctttcccattactaagcaaatgtagctagtacttagaaattatcccaaaaacagcatgtatgaagagatgatgttggaaggggagggaccagccagcctcagtgagttgattctctggtagggaatgtgtcccatagacaacttaggacaggctattcagaggaaattaaaaatgaatgcaggtcaattgaatggatttgtacactaaagtgacttagcaagaactgtaccatgagttattaatatttgagttttaggaaataattggttatgtggtaaatggctttgaattttatacattttcactgggtataatgtggatacttgagggattactctgaaccagaatagtagtatgcattaatatattatacagaaaaagtaaattcgtgattttcttgttatatattggaggtaattatttgaaccactgtatataccatatttgcttgaataaaacaaatgagttatagaaggaattatactagcatctgggtaatataatttctaataattgtgatttctctttcagtttatgaagatagagcaaacattggttaatagcaaattttatgggagtaaaaatatctagatatatttctctttagcaaatactttcattttctgagaaaaataacgcagcagattaaaagatggtatataaatatttttatgttatttaatttttttacatttgggaagggaattggcatttatagattgggtttgggttcatatcttatgtttttaatgtcctcttccaactcctttgaaataataactaatctataactgaggttaaggagcttgtccaagatggcaaaattgcttagtagcagaatgagatccaaagttggatcttccatttccaagttttgctatttaaatacaccattacctttgataatgatgatgatgacagtgatagaatctttacatgtcaggcactgtgttaagcatatgacctatgttatcttatttaatcatcttgacctatattgtgaaatattcagtgaaataaagtaattgtctttttaagctaagcaagtctgctgtcttaaaagacaagtgttttcaactctgaatatataaacgatacttgattataaaatgtcatagaattatttcacttaatttatactaattctttataacttgatccccctttcaaagtccttgactttaaatgaagtatttaaatttttttaaccttaggagatatgagttatcagtacaagaatgttccttttattataatatattgactgttacttgatagttgttacatttctcaagtcatcatattcttccatcttttgtctaaagaacagctcatctttcaagatttagctcttacccctatttaagtgacgtcttccctgatattcccctaaaagctattcctcccaacatgtactttcccatagaattttatacatatttcagatttagtacccacacattctattttaaattacagttggccctctgtatccatgggttccatatccgtgaattcagtttggatagaaaatatatgagaaaaaaatggatggttgcatccatactaaacatgtatagactttttaatcttgtcattattctctaaaccaggggttcccaacccctgggccacggacctgttaggaactgggccgcacagcagaaagtgggccatgggtgagcgagcattaccacctgagctctgcctcctgtcagatcagcagtgccgttagattctcaaaggagagcaaaccctatcatgaactgcgcaagcaagggatctaggttgtgcgctccttatgaaaatctaatgcctgatgatctgaggtggaacagtttcatcccaaaaccattccccctgaacccccctattcatggaaaaattgtcttccatgaaactggctcctggtgccaaaaaggttggggatcgctgccctaaagaatatagtatagaactatttacatagcatttacattgtattaggtattatctggagaggagttaaagtatacaggagggtgtgcataggttatgtgcaaatactataccattgtataccaggaacttgggaatctatggattttggtaaccacagggggccctggaaccaatcccccagagatatcaagggacaactgtgtttgtttacttatcagactgcactagaggctctgaatcttttgaggatcagcacattatcttaccttgctattatgagtatttaacatagtatctggcattttgtggtgtttagtgaactttactgtggatattttctctcatctttggtatagttagtttgcttgtttcagtcatattcagcttcggcacaaatcttatctttgcaggctattctgattcttttaatttctacattttcctcttgctttaacatttcagtttttatttttgagtgggggatgattggtgtacctacatgtatgcagttgtcccttggtatccatggaagattggtttcaggacccctcaggataccaaaatccatggatgctcaagtcgtttgtataaaatggcatagtatttgcatataaccaatgaatatcttctcatatacttcaaatcatctccagattacttataatacctaatgcagtgtaaatgctaggtaaatagttgttctgttgcagtgttgagggaagtgacaagaaaaaatgtacatgttcaatacagatgcaaccatctattttttaaaagaaatattttcgatcccctattggttgaatctatggatgtagaactcatggatacagagggtccactgtaaatacatggtttatattttaaaaaaagttttctggatatttgagactggtaaggagtcagagtgtttttggatctggtcaatggcctgactctttcacttgcatagatgaggaaactgagaaccaggtaggttaagattctatggtccttcacagactaggaattaacacccagattccctgacccttcgtccagttcttttttcattttatcttgatgactgtagttctactttgcttaagctcagtttctgctttataactttcatatggaaacttccgtttttactccagcaggctcagaatacttaaaatgatagttaaataaattactgattaatcctaatctagtgtgctattgctagagtcaagatacttcttgggtacataaaagagtaacataattcataccttcaaataacttgaaattcagaacagggaatggaagaataaacagataaattataatggatgaaagtgatattgtagagatagaaacaaagtgctgtgggaacattaatggagctcctaactttccttggaggagttgggaaggcttcatgggtagacgtcttgtgaaagggatctcgaaggacaagtaactgttccaggattaaaagagcaggaaaagaacagctttccacaaagggatagcttgcacagtgacaagagccacgaaagagtgttttcatggttttttgccttaatgctaactatagactacagtaaattaaatcaactttatttctttttgtagaaatcatttttttttaaaattctagtagtacagttgaccattcatatctttcagttaggaggagttaattaccccttcttgtaggagggtcagccttttgttctgtttaggccttcaactgattggttgaatgaggcccatccacattagggagggcaatctgtttatacagtatactaatgcaaatgctaatctcattcaaaaacaccctcacagacattcagaataatatttaatgaaatacatgggcattctctggcccagttaagttgacacctaaaattaaccatcataagaggtatgtattttttctatcaactctcccttttatttgactgttgaaagatatattgttatacccattgcagaaaaattataaacctgtgcacatggtaggcatttaataaatatcaaatgaatgaagtacaaaaatgaatgagactcactggcaaagaaaaaagacgactttaattttgagtatattgtaattctgaagagaatgtaaagatgaatagatgaaaattaacattttaacatttggcatttacgtttattttcagtagtctttgaggtgaatgatgattaactttttaaggaaattagtgttttccatttataaaaaatgaaatttatatacaaataatcaattttttataagagcaaaaaaacaatggttttgaaagtcagtgaaagttgtttttttttttttttttggtcattaggtttattcccaggctggcctgatatgttcaaattcttgatatctttatctttttatagaggtaaaatatacataacatataatttatttcaaccctttttaaaattttgttttcaattgacacataattgtatgtatttctggggtctaatgtgatgttttgatacatgtatacattgtgtaaaaatcaaattggggtagttagcatgtccatcacctcaactatttataatttctttgtgataagaacactcaaaatcttctggttattttgaagtacacagtacaatattgttaatcatagtcactgtatattttaaccattttaaagtttacagtttggtggcattaagtgatttcacgttgttgttcaaccatcatcaccatccttgtccagaattttttcatcttcccaaactgaaatcctgtgcccattaaatagtaacttccatttctcctctcccaacctcgggtgatccgcccacctcggcctcccaaagtgttgggcttacaggtgtgagccactgcacccagccaaaagtaatttctacaggactcagattctttagttctgtttctttaatatcatgtggaatatatatatatatacacacacacacacatatatatacacacacacatatatacatacatatgtataaacacaaacacatacacacacacatatatatacccaccatagtgatatttatttaaaaattcattttttcccttgcatttgttttgttctcatagtagagctactcttgattctcttatcttgaaacttctatgtattgctccacacctagccctaaccctgtattttcatagtattccatttccttcatctttattacaaagcttaaaataattaaactgggaagacagtcttaaaaggtgagggaggtgaagagactcagcaggccaagccagaattctggcacaggaaaagaaagaccacgaacactcacacatgtataatttttgttttgtcacctaaaaatcgatttgtggacaacaaaactaatttgttatgtatgattaagcctgatgatttcacttccttactgaatattcagcagtgattttatcccaagtcctcctttatctaaagcaaaatacctgtaattcatcttttccttaagagattgtaaacatgttacattaaacaatctgaattttaacattaaaaaaaggtaaagcaaaaacttctatttatctttcatactacctgtctatttataggcttctagagagcatgaccaatatctatttgaacttattttatataacatataacttctgaagatacgtgttttcgctacaacccctttgtttttgtatttttaagaaacaacataaatttattacctttattatagtcctagctaatcttaaataacttacgcaagacttatcagccatggatatatttataactcttttgagtctatttatagctttatttgtctctttgtttgcttctttttgtttgtgtacagctatactatccagtgtggaagcccatttcttgtggcggtgagcgcttataatgtggcttttgagaattgagtgttctttaagtgtaaaatacacaatgaatttcaaagacttagttaaaaaatatatcttattaataatgttttatattagttacatgttgtagatatattgcctttaggttattttattataaataaagcatacttattaaaattcattttacctgtttatatttcttttaatgtgactacttaaattttaaaaattatatatgtacctcacattatatttcttttagatagcattgttctaactgaggtaagtcagttgttaggtcttatattggagactttgggagacaaattcatattttacatgattttatgaactataatagtcacttgtcctttatctttggagcaaaaacgattcatttttatttataatgaaattagaggatattcatcagtaagaaggggaggacagattcagattaagttttgactgggggaagtgacaatgggaggagaccctctaatgcctggtaaagtcaggcctgttatatagtaaacatttgatacatattaattttttaaaaattgggtcaggatttgaagaaatagtaataataggatatttcacaccatgaatagagttatagtttaaatgcataggtgtaagtttaggccctggggagactggaggtgcttttggtttttactgcctgcccttgagagtaggagctagaactccgggcatttgtgaaaaatgaataagagaaaaggtggaggaagggatgagagtaagtaaactgagagtgtttggaacttatttctaatttttgcagtctcataaaatttgatttccaagaattgcaatagtttatcaaagtagagttaaatggcttgctaaaactgagaagaaaattcaagttggtctgatacagttcagtattctaagatcaggatcaccatgaatatggatttttccttaactgttttggtagcagcactattatgtcaaacctttctttttctgtaaggatatcctgtcccctcaccacctcctaaaggaattgtttttttccttcctgcaaattgagttacagttttccattaatctgcaataaaaattgaaagtatgttacagaaaaaataccttagaagccaggtcaaatagtattatatgtaataatacagtaactaattatgaagtgctatgtttatttgtcgtgttttttaagagttgaggtttaatgattcttttttttaccaaaatgttacttttcatattgtaagtttctttagagtatctattgctatgaataaaatattctaaggtgtgaattttatgtttttttcgtaggtgttaatctgttcacatgcttgtttcattgctgttgttgttggaagtcgtccacctggcagacaggaagctctgcttgggtgggattggaggtgcagtctttcaatactggactatactaagtatagattccaatggcaatgtaattccatttccttggcctcattaatactacatagcagttcaagattcctggaatggtcataaaattcttttgaactattaacagtttctcatccaggccttaggataaaaaaaaatgttcatttttagggtgactgacatacttattttaggagtctgttgagtagctgtgaagaagcattttttctttttaaaagtactcatttccataagtgtcatagggagtatgttgagcgaataggttttggtcagatttgctgatgctgcataatgacattttggtctacaatggaccacatatacaatggtggtcccataagattatgatggagctgaaaaattcttatctcctagtgaagtcagagatatcataatgtcatagcacaatgcatcattcactgtggtgatggtggtgtaaacaaacctattgcactgctagttgtataaaggtatagcacatacagttatgtacagtacataatacttgataataagcagctatgttactggtttatgtatttgctatactgtactttttatcattattttagcaagaactcaagcttaaaaaaaaagttaactgtaaaacagcctcaggcaggtcttgcaggaggtattccagaagaaggcattgttatgataagagatgacagctccatgggtgttgttgcccctgaagacttttcagtgggacatgatgtggcggtggaagacagtgttcttgaagatcctgacacttcgtaggtttaggctaatgtgtgtgtttgtgtcttagtttttaacacaaaagtttaaaaagttaaaaagtaaacatagaaaaaggttatagaataagatacaaagaaaatatttttgtatagtcatataatgtgtttgtgttttaagctaattattataaaagtcaaaaagttaaaaaaatgaaagtttataaagtaaaaaagtttatagtaagctaagtttactttaatattaaagaaataaacttttttttgtaaattaagtgtagctcaagtatatacattttataaagtctgtggtagttattgtaatgtcctaggccttcacattcactcaccacacaaccactgactcacccagagcaacttccagtcttggaagctccattcatgttaagtgttctctacaggtgtaccatgttttatcttttatagtatatttttactgtatcttttctgtgtctagatatgtttggatatattaatactattgaattataattgtttatgcaatacagtaacatgctgtgcaggtttgcagcctaggaacaatgggccataccatagagcctatgtatgtgggctgttccatctaagtttgtctaagtacactctgatatttgtacaacaacaaaatcaactaatgacacatttctcaaaatgtatctctgttgttaagtgatgaatgactgtattttatcctagaaataatgtttaaccttattagtgatgtgcactctgaaagataaactaatatattttagttactgtatgacaaactgtcactcagtgtgacagctgaacccaattacattgaaaaattatgctgccaaactctgaaataaattgaagatgacctggctggaaaatataggatatagacatttacaacagagatttgaattccaacgaaagaatggttgtagttttggatcggtatgcattttatattttagaaccttaatttattatctgtgtatgtaaaaagattagagcggtattagtgggaagattgtttatgggaataaaatttaataattagatgtgtcacacttgtggcatgttattagttgttaaagagggactctattaatgtagcttattcctgagaaaaaaccacaagtctaataaaagttttgctttatattattatcaggatatgatcagatattaatgtttaacatacactcataagttattaaattatatcattgtccagttttgactcagttattcagtgtgggttactatatttagctcacagatgatctattcttttgctcctagctatttctctgtggcttcccctcctcctgcacgcacccccatataaataccagtctattggatctaaatatgtatattcattttcaatctaacttcatatctggtcacatatccattttatcccacaaacttttattgattacttaccgtatgtaaagctaggcacttcggatacaatgatcaagataaggtctctgccctggagtttatagagttgtagagggtgacaaatatgggcaatgagatgtgtaaattctatcatagaaatcaattagggtattgtgggctacactgaaaaaagaaatctaccaagtaagtcaaggtaagtctttataaaggtgatgaagcttgagttgagttttgaaagatggctagaagctagatctggctacagctgtgtggtccagcatggcggccactagccacacatgtggctagtgagcatttaaaatgtccttagaatataaaatgcacacttaattttgagggctaggtgtaaaaaaaatgtaaaatatctcaataatttcataatatttactacattttgaaatgatattttggatatttgggtatatgtactgagttaatacaagttaatttcacctgttttattttacatttttcttttcatgtggctaatagaaagtttgaagttatgtatatggcttgtatctgtgacttgcgctgtatttttattggctatcagtggtctggagatttctgaaatttttaagatttttaaattagatgaaccattagaagtatagaaagaaactaaaatatattctagcatgccctctttttctctctatgtgtgcatatgtgtgtacatatgtgtctatatatacacacacataacctttatattgttcaagtcattcatactttgggttttctggttatatgtcagtaaacctcatcctaacagatacattgaattaatagcaacaatttaaaaaccacagaccactggggaaaaacttgttctccctactctggcaaaaattgcttaaataattcatggaaatcaatatggcaacaaatttaaaatacattttattgtcagcaaatactttgaaaggaaaattgaaaacgttacagagttgaggaaacaattattagaatcaaatgttggagtttgttttaagtacaatgagagtactcttattcccaacatgtttttatatattatttgctatattgtgtttcttaatgaaataaacaactgctttttgtgagctctataaaaatatatataagtgaatgtacactttcgacagaaattcctgtattccctgcttattgaaaccagaaatcaagaaggaattctacctttacctggaaagcagaagatgtgttttgtgaagatttacttgacttatcagaacaagtctctcttccggtatttagattgctactttgtatattaactgtcaggggcaccatattttaaacaggactctgaattgaatactagaactccagaatgctggtgcttgataagattttaaagattatttagtttttcagatgtggaaacctaggcacagagaaattactgatttaatgtgggatactccgattttaagttgccatactgtggaactggatttcaggtgtttgattttctagtctagcaatgatctctttggttatattaacgtgagtctcttgggtttggctggtgtattagtttactggaggtgtcatgacacatactgcagactgggtggcttaaaaaattgtaatttattttctcacagttctagtggccgcaggactggtttcttctgaacctttctccttggcttgcagatggccgtcttttccctttgtcttcatatgtgctttcctttgtgtgtctatgtcctaatctcctgttcttatgtgaacatcagttatattagattagggcctatccatatgatttcattttatctgacttatctctttaaaggttctatctccaaatgcaatgccattaggctgtactgtgttccccccaaaattcataatgttgaagtcctcacctttagcatatgaatttttggggggatacagtgcagcccataacagctggtcttaactaagcgaaaataagggtaaaatgagtgatagtgataaaaatgtaaggtcttttattagtaatgctttacttaaattcctgtaaaaatgacagttttctatttgtaaacccattgcttttttactttgaattatttcatccttttccatgcttctactcttttcttcccccccccgatatatttttattctcacatgccttcatctgtgcatccaaaggcactgttgattcagtagtatcagcggaaaagcccaaatagttttgactccagctaattaaaagaaaacacctttaaaaaatatatgctgcaatgtttgtagaaaatctaggtcttacttttctttattaatatcaataataataaaaataataataaacctctgttaagtgcatattaggtaccagggattttgctaaatgctttaccctatgactttggtagttttatagatgagggaactaaaggttaaagaaagtgaaataatttttccaagatttcagagcaaataattgttaaattaagcttcagacacaggcagtacttgctatgcttactgcctgttttttagaattcttaggaatttaacttgcaactgtctcgaatccaagctatactctgattgaaattaagatatggaaataacatcatatgttgatagcttttgtggtaactatcgtgtttactatggcaagcattcagcacactgagctttggatgtttaaatatattgaagctttgattcttgaagtcctcaagaatctgtttgcttacccaggcacaaaatcactcagcatcttcacttggcacataaatgctaattcagtagcatgatatacatggcatgtcataatttgcccctgcctgtctttctagtgacattttattttttctcatagctctacactctttagtcataataaactactacacttattttctggaatttaattattcttatggctccttggggttgctcatgttccttagttccatttaggaaatattttattgattacttactaacgcacaattcaaggtttgtttgtttctgtctgcactattgagagtgatgttggggcccaaaagaccaaaaaggagttgtttacaggtggacttggactgttctgaagagaatctgcagatacctatttgtgttttgctaagtggagcttaaatgacaatgggccacaaggagcagggctacaaagggaagagcagggggagaacgttatctatgtctctgggtccattagtaggtacgtgcttgatcccagctggatcaggttaacactggagcagaattaggaacagagggcaatagaaacagtgagtggggaaaggattattgtggtgactatcactttggtgctccatagcggtgcctagagtagaggacccatcacagaagtgttctagcaatgacttatctaggaaactagctactgtaaacttggttatttgtttatttcttcagacttggtgatacatattatggtcttccattaacattatatggtatatgtcagcagcattcttgtatggttttaaaccctgacagaactataaagaccttttggtgaggagaagcagattagtttaaacatacttgtatttctaggtagttgatgggagcatagcatagggatggtatgcccaactctgaggacagaacaggattgggaagatgattcttatctttaaggatttcaagatctaataagagagactaatgtgtaaattaaaaaatactaaataatgtgttcaggccttagtggtaggactagtcagaattcaaatcctggctcttccctttctttgcttgtgactgagtgaaagtgtgtattagataccacagtatcacagagaagaaagcaatgaactatttgaagcagttgggaaagacattaaggtggaggattcccctgagattggctcgaaagggtcagctgcagtttgcacagtagactggtggagtgagggcattccagataaagaaatctgaattggcacagtgtattctaaatagtgttttcttcctagaaatgtttttctttcccagaaaattcatacatattctttagatttagcttctatatttttttatggatccttgtttaactcacatctatctctcaacctcaggagtcacatggttggcaaatgcacttggttagcaaaactgcagttgccatgatcaaggtctcctggatgacaaggggtgggaggaggagaaattaaggtaatgcattaaatgtgtatatttatttataaacacataactaaaagttctggaaaacagttgtttccaaaaccagaattatctgttgttgtttgtttgtaccgaatgtaataaaatgataatgtagttacaagtttttgtaaggtatgttgctaggctgttgactgttttgatttaatattagtaggagctcttcatgagaagaaacactattacattaaaggtatacatcaattatgagttacatgtttatttcagaaatgttaaatatgaaaaaatgtttattggaaaaaggaaatatggtattctgaattaataactttatgacataggcatttgtattcccatttgtatataagaaaaatgaagtttggtggaatttgaagctaagaactttgggcaatatggagcaagaggcttttataagagagtggcatgagtgaagtagtgtgcccattgcatgtagattcatctgattggatagagtagtgtcctcttatcctttcagtgtttcttatatttcttttcctgaaacgggacttgtcagagagcacagcctcttctgtagcgaagtatgtataagttgggaggtgcttctttctagccccaagttgtgcttgtttctcttaggtcttttataactgtaagctgatgtacttgactctctacatttatatttgtaggattaatgaataaatactattagaatccaatcagtttttgtgtcctggttttctgtaaataacttggcctttgtggtatgactaatctgaatccaaatcctggtctgtcttttcgtggctttgtgaccttcaactatgttacatatctctgagcctgtgttttttttttttttctctctctctctctctgtgtatgtgtgtgtacctgtatattctcacatatatgaaaatgaggtaaatgatgttatttttccttttatttccctcataagtggaaactgtatatatgagagaattctatatataacagatcattatattattgtttctgctactatactgcatgttcatttagcacatttattagtcaaaatgtggtccacagatgaggtttgcatattcatgaaatatttgctgttctaagaggagataaggaacttgtgccagaatgcaaatcatctgtgctaagtacactatttctttcaactaacctttcttttttttttttttttctcataacaagactttcttgatgaaggaagcagaatgtcgattcatattttacttctatctcctcattggctggcactctgagtagcctgaatgtagagtgctttgggaagatattttgaagaaagcttaattttatttatattacttttcatttttggtgttagaaaggtttgttattattagtgaaaaggttattaaatttgaacttggattctaatcgtgtctttgctactgattagttgggcaactgaattaaatcttctaggccttattttcctgacggaaaatgaaggttgggttagatatctgtggtttttgtaggctttaacatgttaataattatgttttttaagtactatttttttcttttacctttttttttttaaaaaagcaaaactgagacctcgtcaaagtagtagataagaagcactgcaatagaaacatactttaagaagcctctttttggaatagatgttttattaagctgtagtcaaccatatggcaaggatttgatgctaaggctataatgattgagactgtttttgtcttcaagtagtaatatcctgggaaagatagacaagtaaatacatacaaatgtaaatacataaatcggtagtgtgttagagatatggaccaaaaatgtgtgaaacaggaggctgtgaaagactctctagaacaaaggtaagcaaacattttctataaggatccaaatattttagcctttgtgggccacatggtgtctattacaactactcaccctgcagttgtagtggaaaggcagccatgtaaataaaaatacatcatttttcaacaccaattctctggcactaattaagtgtcctaaaattcaatcctgatactacatagagttagtgcaaacctcttaaattagaggcagaatccttcaattctgacactaattgaaagttagtacagactccacaagttaaggagccagtcccacaagactgcttccatttcagataccagcctgaaataggctacctgcacttctgctcaactgaccacaaattcagaggttcccacaacttccctcaggttctgtaatcactagaatgactcagagttcaggaaagtgctacacttacaattacagttttattataaaggaaacagcttaggaacagccaaatggaagaaatgtataaggaaggcactgagagggagtgggctatagagcttccatgcccttactgggcacaccaccctcccagcagattgatatgtttgccaacctggaagcatcctggacctcgttgtttgagttcttatcaaggcttcaattatgtggcctgatttatgggccacgtaattgaactcaagtaccagccttatattcacttgcttagttttttttgacttggccagcccttcccttgaaactatctaagggccccaacatgagttagcttgttagcatgagctcagctatggtcaaaagggtcttgttatgaatagcaaaggacactcttatcacccaggacattctaaagatttttgaagttctgtgccaagaattgggggcaaagaccaaatatattttaaattatacgataggcagccattactgatatgtaaatgaatggccaatggccgtataataaaactttatttacaataagacattgagctagaactgacctataggtagtagtttgcagacccttgctttagaaaaatgtgaaaaactgctgaaagaatgtgacatttgaactgtttcttctatttattttaaactttttgctgatatgatactattttatagaatttttaaaatttattttcagtagcactaatagatttttttaaggtgctatgagagtgagtaaggaactttttttaaacacatatgctgtgattaatgtgttttaatatcaattattaatatcaattgattgttaatatcaattgattattaatgtgttttaatatcaattgagaaggacttcagttaagtcctctttgtgcctcttactccagtaggtgggcttgaaaactacctactggatcacaactggtaggctttattctcctgagtgatcatgacttttatcacattccttgattagtgatgtttctgttgagaatgctgtttaccttctgtcgtttatgttttgcatttatattttgcatcccactcttgttttcaacatagtgaaaggaattagagccttgggttggagttttattcctctgacttaatgggcctgtgactaggcaggttccacattctgagagctgtccagtgagggattagaaattcgacacttactgctgtgtaataagttaaagcatgaacatttaaaattttttggtttttaaaaaaaaaaaactaaaattttttggtttccgttttttctttttttctggcttgatagttttattttttattttttaacttttattttaagttcaggggtacatgtacaggtagagtgcttttgggagatattttttacataggtaaatatgtgtcatgggggtttgttgtgcagtttatttcatcacctaggtattagcctagtagacattagttattctttttgatcctcccacccttgaccctccgataggcccagtgtgtgttgttcccctctatgtgtcagtgtattcttaccatttagctcccacttacaagtgagaacatacagtattttgttttctgtgttagtttgctgaggataatggcctccagctccatctatgtgtctgcaaaggacattatctcattcttttttatggctgcatagtattccatgctgtatatataccacgtttttttttttatccagtctatcattgatatgtattgaagttaatttcatgtctttgctattttgaatagtgctgcagtgaacatatgcatgcatgtgcctctgtaatggaatgatgtatattcctttgggtatatacccagtaatgggattgctgggtcaagtggcatttctgtctttaggtctttgagaaatcattgcactattttctacaatggttgagctaatctgcactaccaccaacagtgtataagcatttctttttctccacaaccttgccagcatctgttggtttttgactttttagtcatagccattctgcctggtgtgagattgtatctcattgtggtttagtttgcatttctctcatgatcagtgatgctgagctttgtttcatatgattgttgggcacatgtatgtcttcttttgagaagtgtctgttcatgtcctttgcccattttttaatggcattgtttgttttttttccttgtaaatttgtttaagtggcttatagatgctggatatgagacctttgtaagatgcatggtttgtaaaattttctcccattccgtaggttgtctgtttaccctgttgatagtttcttttgctctgcagaagctcttatttgtcaatttttgcttttgttgcagttgcttttggtgtcttcatcatgaaatctttgcccatgcctatgtcctgaatggtattgcctaggttgtctttcacagtttttataattttgtgttttatatttaagtttttaatacatcttgagtttatttttgtatatggtaaaaggaaggagtccagtttccatcttctgcatatggctagctagttatcttagcaccatttattgaatagggaatcctttccccattgcttgtttttgtcaggtttgttgaagatcagatagtggtaggtgtgcatcatatttctgggttcttttttctgttgatctgtgtgtctgttcttgtgccaacaccatgctgttttggttaatgtagctctgtattatagttaagttgggtagcgtgatgcctctagctttgttctttttgcttaggattgctctggctattcaggctcttttttggttccatacgaatttaaaagtagtttttttctggttctgtgaagaatgtcaatggtagtttaatgcgaatagcattgaatctgtaaattactttgggcagtatggtcattttaatgatattgatttttcctatctatgagtgtggaatgtttttctatttgtttgtgtcatctcttgatttctttgagcagtggtttgtagttgtcactgtagagatctttcacctccctagttagctgtattcccaggtaatttattctttttgtggcaattgtgagtgggagtttgtttgtggtttggctctcagtgggactgctgttggtgtataggaacgctagcaatttttgtacatttattttgtatcctaagatttccctgtagttgtttatcagcataagaagcttttgggctaagatgatggggttttctagatacaggatcatgtcattggcaaacagggttagtttgactcctctcttcctatctgaatgccctttatttatctctcttgcctgattccctgctgaataggaggggtgaaagagggcatccttgtcttgtgccagttttcaaggggaatacttccagcttttgcccattcagtatgatgttggctgtgggtttgtcatagatggctcttattattttgagatatatttcttcaatacctaggttattgagaatttttaacctgaagggatgttgaattttattgaaagcgttttctgcatctattgagacaatcatgtggtttttgtctttagttctgtttatatgatgagtcacatttattgatttttttatgttgagccaaccttgtatcctggggatgaagcctacttgattgtggtgaataagtttgttgatgtgctgctggattcagtttggcagtattttgttgaggatttttgcatcgatattcatcaaggatatcagcttcaatttttcttttctttttttttttttgtatcaggatgatgctggcctcatagaatgacttagggaggagtccctccttttcaaattttttggaatagtttcaataggaatggtactagctcttctttgcacgtctggtagaattcagctgtgaatctgtctggccctgggctttttttggttggtaggctattactgcctcaatttcagaactcattattggtcagttcagggattcagtttcttcttggttcagtcttggcagggtatatgtgttcaggaatttatccattttttttctacatttttaagtttatatgcatagaggtgtttataatattctccgatggttgtttgtgtttctgtggagtattccccttaccatttcttattttatttgaatcttctctcatttcttctttactagtctagctaacagtttatgtattttattatttttttcaaaaaatcagctctgggatttgttgatccaatgaatcgtttttcatgtctctgcctccttcagttcagctctgattttggtatttcctgtcttctgatagctttgggatttgtttgctcttggttctctagttcttttagttgtgatgttaggttgttaacttgagatctctctaattttttaatataggcatttagtgttataaatttctctcttaacactgccttagctatgtcccagagattctggtaccttgtatctttgttctcattgtttcaaagaacgtcttgatttcagctttaattttattatttacccaaaagtcatttaggaccagggtattcaatttccatgtaattgtatggttttgagtgaatttcttagtcttgagttctaatttgattgcgctgtggtctgagagactgttatgatttcaattcttttgcatttcctaaagagtgctttacttctgattatgtgatcgattgtagagtaagtgctgggattacaggcgtgagccaccacaccggcctggtttttgttcatattctgaattctacttctgccctttcagccatctcagcctcagcccagttccgaacccttgctgcagaagtgatgtgatcatttggaggaaagagagcactgtggttttttgagttttcaatgttctcgtgctgattctttctcatctttgtggactttgctaccttaaatctttgaggttgctcacctttggattttttttttcttttaatagtctggctgcttttccacaggactgttgcggtttgctgggggtccactgcagtccttagtcatttcgggttttccagtacctacctgaaggtatcaccagtgaaggctatgaaacagcaaagatggcagcctaccccttcctctgggtgctccatcccagggaggtacagacttgttcctggcccaaacatacctgtaggaggtggctggagatcctgactggcaggtcttgcccagtcaggaggaacaggattggagacctgctaaggaagcagcctggccacactttcatagagcagctgtgctgtgctggggtaccacttctgcctctagttggcttgggctctctaaaacctagaggctagaatggctaagttgcccaaatagcaaagatggcagcctgcccctccctctgggagctctgtcccaggaagttttcaaatctttgttggccagagaacattcgccagggtgtctggaggtcccccttgcgaggtcatgcccagtgatgaaaaacggatcagtctggtcatgttttggtagaggagctgtgctgtgctgggggattccttctggcctaggttggtttggactctccagggcctgcaggctggaacagctgagtcatccaaacagcaaagatggtggcctctactccccacaggaactctgtcccaggtaggggtgacactgttgcccctggttagctggaattccaagccagtgggtcttatcctctgtggtgccatggaagtggggtccgcagaccgttactgcctgcttccctggattcagcccccttcccaggggtatgtacggaagtccaacctcctgcgttgctggagttgcagtcacttttgccaggatacccagagccagagtctgtaaaactcctgggcccctctgcatgtctgagtggctgctctgctgagactccacacagctctttgtgtcagactgaaggccctgctggagtgggttcatgaagggatctctcctgacctgagggttgcaaagatccgtgggagaagcatggcatggtttcctggggttgcacattcactcacgacttcacttggtgggggaggttcctccggctttgtgtcactctcaggtgggccgtcatcctatctgcttttcattgttctttatgggttgagttgctttcctgattagtcccaatgcaagtacctggatgtttcagttgaaggtactgtatttacttgcccctttcattcctctctgtgagagccatgcaccattgctgcttcttgttggccatcttggcccaaatcctctgttttctttttgccagagtagaagtggtttcctcttcttacctggacgtttcacaatggaatgaataagcaagctgatatcaatttatcagcttatcttgttagtttcatttcttagtatatgtgaggtttcaaatggtcacaaagatgaacatttaaaaggcctccaaacaaggaaaactggcagtgggccagaactgactattttaatagggatagagagtttgagtttgttactatcctgttgcttaggtaatgttactgtaagcagaggatagagaataaagagaattgcccgtatgagtacatacaaaaatgatgatgaaatgagggtaatgggaaaataatattttagggatagaataaatgcaaaattcagaaaaaccaaagtggagtttattctttttgtcagtagccacagatgagttgctagtatcatttttaaacacaaatggcaagtacttaaatgtgtttatatgtgtggactacagcaatattctaccagttagcagcacatgaaatagcttgttcacttgctggttcaattgaaatgtttttacttaaatacctattaaacattgttgatactgaattaggcttgtcaggagaaaaaatagaacactagttttcacaatttttacccggtagtagctcatgcatgaggctaagcatgtagtcctcatactatcaccttgaggtaaagtcctgttatccacaatttacatatggggaaaggagattaagtaacttccctaggtcaagcaggtagaaatggctgcacaagactcaagccttttactggttttcttcctaacagacataatttcttaagttctgtgagaaaattacaaagaaatctggaagcatcacattatccaacttcaaactatattataaggccttagtcaccaaaatagcatggtactggtataaaaatagacacatagaccaatggaacagaatagagaacccagaaataaagccacatacagccagctgatcttcgacaaagcaaacaaaagcataaagtggcaaaaggacaccctattcaacagatggtgctgggataattgacaagccacatgtagaagaatgaaactggatccttatctttcaccttatacttgaaactaagacctgaaaccataaagaatctagaagataacattggaaaaacccttctagacattggcttaggcaaagacttcatgaccaggaacccagaagcaaacgtaacaaaaaccaagacaaatagatgggacttaattaaactaaaaagcttcagtacagcaaaagaaataatcaccagttaacagaaaacccacagagtgggagaaaatcttcacaatctatacatccaacaaaggactaatatccagaatctacaaagaactcaaatcagcaagaaaaaaaaaatcccatcaaaaagtgagctaaggacatgaataggtaattctcaaaagaagatatacagatggtcaacaagcatatggaaaaatgctcaacatcacttattatcagggaaatgcaaatcaaaccacaatgtgataccacctcactcctgcaagaatggccatatcaaaaaatcaaaaactaatagatgttggtttggatgtggtgaaaagggaacacttttacactgctggtgggaatgtaaactactacaaccattgtggaaaacagtgtcgagattccttagagaacttaaaagtagatctaccctttgatccagcaatcccactactacgtatctacccagaggaaaataagtcattatatgaaaaagatacttgcacatgtatgtttatagcagcgcaatttgcaattgcaaaaatatggaatcctcccaagtgcccatcaaccaatgagtggatgaaaaaaatgtggtgcataaataccatggtatactactcagccataaaaaggaatgaaataatggcattctcagcaacctggatggacttgcagactattattctaagtgaagtaactcaggaatggtacccaaacctcatatgttctcactcatatgtgagagctaacctacgaggacacaaaggcctaagaatgatacattggagtttggggacttggggcaaagaatggggggtggcaaaggataaaagactgcacatggggtacagtgtacactggtctggtgatgggtgcaccaaaaactcagaaatcaccagtaaagaacttatttatgtaactcaacatcacctggtctctgaaaacctattgaaataaaaaatttaaaataaattacaaagaattatgactttctaaggattggatagatatctttttcttttttctttgttttttgtttttttttttttttcatggagcagagactcagacaaaacttcataaaggagagatatataagatgaagtgaaaatctaaggtgaggcctaagcatggagggcattgaatgttaggtgacaacttgaggagttacttgagtcatagagctgttttatttcttttgttcattttacctctcgtaaaccattctgtgctacttttttctccaggaagattgttcaaatttttgaggctttgtagttaaatgctattttgcttctagagaacttttctttttctctctatttttttttttttttttgagacagagttttgctcttgttgcccaggctagagtgcagtggtgcaatcttggctcaccgtaacgtctgcctcccaggttcaagtgattctcctgcctcagcctcccaagtagctggaattacaggcgtgcaccatcacggccagcaaattttgtatttttagtagagatgatatttcttcttgttggtcaggctggtctcgaactcctaacctcaggtgatccgcctgccttggcctcccaacttgctgcaattataggtgtgagccactgcgcccagctagacctattacctttgcttatatacttatgtgtaaatactgaatataaatggatatgaattgtacataattatctttttttttttttgagatggagtctgtctctgtcgcccaggctggagtgcaagggtgtgatcttggctcactgcaacccctgtctcccggattcaagcgattcttctgcctcagcgtcttgagtagctgggactacagtcatgtgccactgcacccagctaatttttgtatttttagtagatactgggtttcaccatgttggccaggctgatctcgaactcctgacctcaggtgatcctcccacctcggcctcccaaaatgctgggattgcaggtgtgagccaccacgcttggctggattgtacataactatcttaaacagaatagatgctaacattaatctgtattgagaagtaatctaattcattttgatagttggagtcattttcccctccagatgaaggctaatgaggttcaggattttgtttcacatttcttgcacctgccatacactaggcattcaatcactatttgtagaaggacagaaggatacacttttaatttaaagttcttttttttttgagacaggtttttgctctgtagttcaggatggagtacagtggtatgatcacagtttactgtagcctcaaactcctggactcaagcagtccacctgcctcagcctcctgaatagctcccattatgcctgactaattgattaaaaaaattttttttttagagaatgggtctcactgtgtggcccaggctggactcaaactcttagtctcaagtgatcctcctgccttggcctcccaaagtgctaggattacaggcatgggccactacatcctgcctaaagttattctttaatcaatcttcaaaccttgggatgggcatattctaagcagtgctgatcaaaaagtaagtatcaatgatttcagggaaattctggaagactcttaagtcagctataattattaatggcaagatttggttctggcacacagacttcagataactaatatttactgataggaagaattgaaaaaattttatagtgaacacccatatatgtaccacctagagtctacaatttacattttactaaaataactttatcacatatctgtatttttatgcatccatcgatctgtctattttttctggatccgtttaaaccaggttgacgccatgcatattttttaactgaaattcaatgtttggctacctccccaccataaaattacatacagtgaaaacatctaatattctgtgagttgtgacaaatgcatgtacctgagtaacccaaacctagaacattatagtcatcccagagagttcctcgtactcctttccagttaatccctacctccatactcccagagatggtcagaggtttttttttcccaccatagattagtattggctgttgtagaatcttgtataaatggagtcttaacagtgtcaatgaacccttttgagtaaaacttcttttatttaacagaatgcttttgcaatttgttcatgttgtgcttatcagcatttgttacttttactgatgagttgtggaccattgtataaatataccagagtaagctaatccattcttctactcatggaactctaggttgcttccagtttttggccattatgaataaaacttccttgaatattcacccatgagtcattttaagattcatgtttttattccttttgggtaaatacctaagaatgtaattatcaggtagagagatggcatatgcttggttttagaaacctgacagaccattttattaagtgattaaaacattttgtattttcaacaatgtataacagatctcttttccccagcatttcatatggtcagctcttttagacattctgatggctgtgtattgataccccactgtggttttaatttgaatttctgggatggccagtgatgtcgagccctttttcatgcctttatgcaccatttaaaaattttcccctggttgctgggcacagtggttcacacctgacttcgggaggccaaggcaggcagatcatctgaggccaggagttcgagaccagtctggccaacatggtgaaaccccacttctactaaaaagacaaaaattagctgggcatggtggcgtgcacctgtaatcccagttgcttgggaggctgaagcaggagaatcactcgaacctaggaggcagaggttgcagtgagccaagattgagccactgcactccatcctgggtgacagagcaagactctgtctcaaagaaaaaaaaaagaaaaacaattttcccctgggaagtacctattcaaatcttttgccaatttgtaaattttttaaaatgtaagagttcattatcctagatacagatttttaagtcagatgtatgttttttggaaattttttaaaagtctgtatattttctttttacttaaagctatattttcaggagcacttttaaatattgatagaatttaattcatcaactatttcttttatggttattactttgtatccttaagaaaacattgctttccctgtagatcatacagatattcttctgtgttttcttctagaggctttatagttttaattctcatgtctgttatctatatgaaattaatttttgtgtctggtgagataagggttcagatttcttttttcatattaatatccatttgtttcatcaccacttgtggaagagactttgctttttctattggattgctgtagtacctttgaagaaagttgaatgatgtgtaagtatgagtctttcttgttccattgatccatttgttggtctttatgtcagtactgtggtgtactgtggtgtctcaattactgtagttttatgtaaattttgaaatcaggtagtttaagttttccaatttgttgttgttgttttgccctaggattgccttagagtctagctgttttttttgttgttgttgttatttatataaatattttataatcaattgtcagtttctagcaacaatcctgggtatgttgaatacatagtttaatgagggggaagaggagattgacttgttacatgctactgtcttcaaatcattagtatcatgtatctctctaatttactagatcttttaaaaatttcttccagcaatgttttctggtttctagtttagaagtataacttttttttattacattttattacatttttattacatttatttatttatttatttatttatttatttaaatgctatttgctatggttggaatgatggtgttcctccaatgtatgttgaaacttaatcctaatgcaacattctgaagaggtgtgtcctttgggaggtgattaagtaatgagggctctgccttgttgaatgggtacccttatatttaatacagtgttgaatgtcggtgatgaaaatgagcatccttaggttgttaaggatattaggaggaaattggttactatttgatcatttagtagattacaattaagatgttagctataggagtttgtagatactatttatctagttgaaaaagtttttcctcttcctagtttgctaagagtttataccatctgaattttgtcggatgatttttctacattgattgaagtgcccctatgtatttctccttttattagtatgataatagttatatgtattttcttaaaatagcttcattgaggtataatttatatatcataaaattcacgtgtttttagcatacaattcaatgaattttagtgaatttacagttatttaactgtaatcaaaatgtacttttataacatttccgttactctccaaataaataatatgctaatttgtagttatttccaattcccacccccagcctaaggcaactaccgatttaccctctccatgtttgccttttcttgacattttgtatccatggagtcacacaatgtgtggtcttttgtgcctggcttctgtgacttagtataacatttttgaggctcatctattttcctttttattgccaagtaatattatgtggatataccacagtttgattatccatttaccagtttacgaccatttgaattgtttctaatttttggcttttatgaataatgctgatatgaacatttgcatctaagtcttcatatggatatatattttcatagatacctagaagtgaaattctgggtcatatggtaaatccttgctttaagaaactgccagactatttccaaagtgattataccactttacattgccactgacaattgatttttgaatgttataaacaatcttgcattcttaggataaccccatgatgtattttccatcttgcgtattgctggatttggtttgttaacaatttaaggatttgtgtgtctgtgttcatcagagattttggtctgcaattttatttccttataatgtccttgtcaggttttgtctatgaatgatttttatagaattcaccaataaaacattggcctgcacttttctttgtgggaaggttttttttttttataatggggttttctttttaatctagattgtttgcattttccttcatcttgtgtcagtaaattgtgttttgcaagggatttatttgtgtcatctaagtagttgaatttgttagcacactgttcataaacatttctctgatattcttttaatgtctgtaggatctatactgataatcctttccagatattgataatttatgttctctcttctctctctctctctctctgtctcttaagcttatggtttatcaacattattaatattattaatttcaaagaaagaaatttggctatgttaattctattatttgttttttattttattaatttatgttcttattattactttgtcctacttgctgctatgagttttctttgttctttgattagctttatgaggtgaaactgtgggtcaataagagctttttcttttctaacactgtataacttcctctaggcactgctttagctcattttacagaatttaatagaattttgatcagattagttaggagtgttgtttttgaaggcatttctaaagattttgttgttattgatttttttttttgagatgaagtctctctctgttgcccaggctggggtgcactggtgcgacctacctcagctcactgcaacccctgcctcctgggttcaattgaatctcctgcctcagcctccctagtagctggaattacaggcatctgccaccatgcccagctaattttttatatttttagtaaagacagaatttcaccatgttggccaggctggtcttgaactcctggcctcaggtaatcctcctgcctcggcctcccaaagtgctgggagtacaggtgtgagccaccatgcctcacctgatttcgaatttaaatccattgtggtacaaagacaggatctgtggacttcagtacttttaaatttattgagactcgtcttatggctcatcatatatttcctgttttggtgaaaacaccatgaacacttgtaaagaatggtgttttatgattattggttgtaatgtttctaagctctcaattaagtcaagttaattatagtgttgttcatatattttatggtttcacctatgggttttttttgcttaattttatcagttattgagaaagggtcttaagagtctcaactatgattgtggaattttctttctccttttaattacttaatatttcagttttgctttatgtattttgaaattcttagcaattgtgtgcacatttgattgttatctgttcctcaggaattgacctttgggttattattattattattattttatactttaagttctagggtacatgtgcacaacgtgcaggtttgttacataggtatacatgtgccatgttggtttgctgcacccattaactcatcatttacattaggtatttctcctaatgctatacctccccctgacccccaccccacaccaggccccagggtgtgatgttccccgccctgtgtccaagtgttctcacactgttcaattcccacctatgagtgagaacatgcggtgtttggttttctgtccttgcgatagtttgctcagaatggtggtttccagctgcatccatgtccctgcaaaggacatgaactcatccttttttatggctgcatagtatcccatggtgtatatgtgccatattttcttaatccagtctatcattgatggacatttgggttggttctaagtctttgctattgtgaatagtgccacaataaacatgtgtgcatgtgtctttatagtagtatgatttataatcttttgggtatatacccagtagtgggatcgctgggtcaaatgatatttctaattctagatccttgaggaattgccacactgtcttccacaatggttgaactagtttacactctcaccaacagtgtaaaattattcctatttctccacatcctctccagcatctgttgtttcctgactttctaatgatcgccattctaactggtgtgagatggtatctcattgtggttttgatttgcatttctctggtgaccagtgatgatgagcactttttcatgtgtctgttggctgcataaatgtcttcttttgagaagtgtctgttcatatcctttgcccactttttgatggggttgtttttttcttgtaaatttgtttaagttctttgtagattgtggatataaggcctttgtcagatgggtagattgcaaaaattttctcccattctgtaggtagcctgttcactctgatggtagtttcttttgctgtgcagaagctctttagtttaattaatttagtttaattgacaaatcccatttgtcaattttggcttttgttgccattgcttttggtgttttagtcatgaagtccttgcccatgcctctttcctgaatggtattgcctaggttttcttctagggtttttatggttttaggtctaacatttaagtctttaatccatcttgaattaattttagtataaggtgtaaggaagggatccagtttcagctttctacatatggctagccagttattaaatagggaatccttttgtttattaaatagggaatcctttccccattgcttgtttttgacaactttctcaaagatcagatggttgtagatgtgtggtgttatttctgaggcctctgatctgttccattgttctatatatctgttttggtaccagtaccatgctgttttggttactgtgccatgtagtatagtttgaagtcacttagtgtgatgcctccagctttgttctttttgcttagcattgtattggcaatgcgggctcttttttggttgcatatgaactttaaagtagttttttccaattctgtgaagaaagtcactgatagcttgatggggatggcattgaatctataaattatcttgggcagtatggccattttcacgatattgattcttcatgagcatggaatgttcttccatttgtttgtgttctcttttatttcgttgagcagtggtttgtagttctctttgaagaggtccttcacatcccttgtaagttggattcctaggtattttattctcattgtagcaattgtgaatgggagttcactcatgatttggctctctgtttgtctgttattggtgtataggaatgcttgtgatttttgcagattgattttgtatcctgagactttgctgaagttgcttatcagcttaaggagattttgggctgagatgatggggttttctaaatatacaatcatgtcatctgcaaacagggacaatttgacttcttcttttcctaattgaatatgctttatttctttctcttgcctgattgccctggccagaacttacaacactatgttgaataggagtggtgagagagggcatccttgtcttgtgccagttttcaaaaggaatgcttcaagtttttgcccattcagtatgatattggctgtgtgtttgtcataaatagctcttattattttgagatacgttccattaatacctattttattgagagtttttagcatcaaaggctgttgcattttgttgaaggccttttctacgtctgttgagataatcatgtggtttttgtcgttggttctgtttatgtgatggattatgtttattgatttgcatatgttgaaccagcctggtatcccagggatgaagccgacttgattgtgctgaataagctttttcatgtgttgctggatttggtttgccagtattttattgaggatttttgcatcgatgttcatcagggatattggtctaaaattctcttttttgttgagtctctgaacaggctttggtatcaggatgatgctggcctcataaaataagttagggaggattccctctttttctattaattggaatagtttcagaaggagtgctaccagctcctttttgtacctctggtagaatttggttgtgaatccgtctggtcctggactttttttggttggtaggctattaattattgcctgaatttcagaggctgttattggtcccttcagagattcaccttcctggtttagtcttgggagggtgtattgttcaggaatttatccatttcttctagattttctagtttatttgcattgaggtgtttatattattatctgatggtagtttgtatttctgtgggatcagtggtgatatcccctttactattttttattgcatttatttgattctcctctcttttcttctttattagtcttgctagcagtctatcaattttgttgatcttttaaaaaaaccagctcctggattcatggttttttgaagggtttttttgtgtctctatctctttcagttctgctctgatcttagttatttcttccttctgctagcttttgaatgtgtttgctcttgcttctctagttcttttaattgtgatgttagggtgtcgattttagatgtttcctgctttctcttgtgggcatttagtgctataaatttccctctacacactgctttaaatgtgccactgagattttggtacattgtgtctttgttctcgttggtttcaaagaacgtctttatttctgccttcatttcattttgtatccagtagtcattcaggagcaggtttttcagtttccatgtagttgtgcggttttgagtgagtttcttaatcctgagttctagtttgattgcactgtggtctgagagacagtttgttgtgatttctgttcttttacatttgctgaggagtgctttacttccaaccatgtggtcaattttggaataagtgcgacgtgttgctgagaagaatgtatattctgttgatttggggtggagagttctgtagatgtctattaggtctgcttggtgcagagctgagttcaagttctggatatccttgttaacctttggtctcattgatctgtctaatattgacagtagggtgttaaagtctcccattattattgtgtgggagtctaagtctctttgtaggtctctaaggacttgctttatgagtctgggtgctcctgtattgggtgcatatatatttaggatagttagctcttcttgttgaattgatccctttatcattatgtaatggccattggtttaatgtctgttttatcagagactaggattgcaacccctgcttttttttgttttccatttgcttggtagctcttcctccatccctttattttgagcctctgtgtgtctctgcacatgggatgggtctcctgaatacagcacactgatgggtcttgactctttatatttgccagtctgtgtcttttaactggggcatttagtccatttacatttaaggttaatatttttatgtgaatctgatcctgtcattatgctgttagccggttattttgcccattagttgatgcagtttcttcctagcattgatggtctttaagtttggcatgtttttgcagtggctggtactggttgctgctttccatgtttagtggagctcttgtaaggcaggcctggtggtgacaaaatctgtcagcctttgcttgtctgtaaaggattttatttctccttcacttatgaagcctagtttggctggatatgaaattctgggttgaaaattcttttaagaatattgaatattggtctccagtctcttctggcttgtagagtttctgccgagagatctgctgttagtctgatgggcttccctttgtgggtaacccgacctttctctctggctgcccttaacattttttccttcttttcaaccttgctaaatctgacaattatgtgtcttggggttgctcttctggaggagtatctttgtggtgttctttgtgtttcctgaatttgaatgttggcctgtcttgctgggttggggaagttctcctggataagatcctgaagagtattttccaacttggttccattatccccatcacttttaggtacaccaatcaaacgtagatttggtcttttcacatagtcctatatttcttggaggctttgttcatttatttttactcttttttctctaacttctcttctcgctttatttcattaatttgatcttcaatcactgatattcttttttccacttgatcaaataggctattgaagcttgtgcatgcatcacatagttctcatgccatgcttttcagctccatcaggtcatttaaattcttctatgcactgtttattctagttagccattcatctaatcttttttcaaggtttttagcttccttgcaatgggtttgaacatcctcctttagctcggagatgtttgttattactgaccttctgaagcctacttctgtcagctcgtcaaagtcattctccatgcagctttgttctttgctggtggggagatgctatcctttggaggagaagaggcactctggtttttagaattttcagcgtttctactctggtttctgcaaatattgcagaacagcaaatattgctgcctaatctttcctctggaaggttcgtcccagagggttacccgcctgtttgaggtgtcagtcggcccctactgggaggtgtctcccagttagccagttaggctacacgggggtcagggaggaggtagtctgtctgttctctgagctcaaacaccatgctgggagaaccactgctctcttcagagctgtcagatagggacgtttaagtctgcagatgtttctgctgccttttgttcagctatgccctgcccccagaggtggagactatagaggtagccggccttgctgagctgtggtggggtccacccagttcgagcttttccggctgctttgtttacctactcaagcctcagcaatggcagacccccctgcccctgccaggctgctgcctcacaggtcgatatcagactgctgtgctagcagtgagcaagtctctgtgggcgtgggatccgccgagccagacatgggatataatctcctgttgtgccatttgctgcggaccagagctgttcctattcggccatcttggactgacctttgtattgttatgaaatgttctttgtatttggtgatacttcttgtctcgacgtttactttatctaatagttatattgttgcacaatctgtcttgtttatttgcatggtatatctttttctgttcttttactattaatttctgaattttttattttcttatttttctgtaaacagcatgtagctgagtctttataaaaattaaaaatccattgtgacattcagtcttttaataggaaaatttgtgttccagtagtatttaatgtaattactgatactggatttaggccttctatcttactactatttgttgtttctttgtcccatttgttttttcttcctgtgtacctccttttctgccttctttggattagttgattagaatttcattattttatatatttgttttttaggcgtatctccctgcattattattttaatgattcttctacatctctagcttttcagtctagagttgttaccatactgtttcacttaaaaaatagaaatgttcatccttacaataattaaaagtcatttatcttcctcttctgctgtagttgtcatgtgtattatatctacacatatatacccaataaatgtattagtctgttctcacattactataagtaactacaagagactgggtaatttatgaagaaaagagatttaatcgattcacattttcacagggtgtacaggaagcctggctggggaggtttcaggaaacttacaatcatggcagaaggtgaaggggaaacagacacatcttcacatggtggagcaggatagagggtgaagggggaagtgctacatattcttaaacaaccaaatcttatgggaactcactgtcatgagaaccgcaaaggggaagtctgcctccgtggtccagtcgtctcccactaggtgccccctccaacactgaggattacagtttgacatgaggtttgggtggggacacagagccaaactatatcattccacacctagccctcccaaatctcatgtccttgtcacctttcaaagcacagtcatggcttccaaacagacccccaatgtcttaactcattctagcattaactcaaaagtcgaagtccaaagtttcatctgggacaaggcacgtctatttgcctatgagcctgtaaaaccataaacaagttagttacctccaagatacaatggggctacaggcattgggcaaatgttcccattccaaaagggagaaatcggccaaaacaaaggggttacagaccccatgcaagtccaaagcccagaaaggcagtcatcaaattttaaagctccaaaataattttctttgactccatgtctcacatgcaagcacactgatgcaaggggtaggctcccaagacgttgggcatttatgctcctttagcttggcatggtatagcctccttggctggtttcatgggccagtgttgaatgcctgtggcttttctaggcacatggtgcaagccgtcagtgggtctaccattctgagttctggaggatggtggcttttttctcacaactccactaggcagtgccccagtggggactctttgtgggggctgtaaccccacatttccccttcacactgcttagtagattctccatgagggctctgcccctgtagcagacttctgccaggatatccagacatttctattctctgatagctatttggaggctcccaagccttaactcttgccctctatgcccccacaggcttagaaacacatagaagtcaccaaagtttgcagcttgcaccatctggagcagtgacctgagatgtatctggggcccttttagccacagccacagctggagctggagaagctaggatgcagggagcagtgttctgaggttgtgtagggtagcagggccctgggctttgctctcaaaaccattcttcccttaggcctctgggcctttgattggaggggctgcgggaaagccttcaaggcattttccccattgtcttggctattaacattcagctcctctttacttatgcaaatttctacatccagcttgaattcctccccagaaaatgggcttttcttttctccctcatggtcaggctgcaaattttcttaacttttatgctgtttcctttttaagtataagttccagtttcagatcatctctttgcttatgcatgtgaccatatgctgttagaagcaaccaggccacatcttgaagaacactttgctacttagaaatttcttctgccagatatcttaaatcatctctcaagttcaaagttccacagatctctagggcaggtgcagaatgccttcagcctctttgttaatggttaacaaaagtgatctttgccccagttcccaataagttcctcatctgagactacttcagcctggacttcattggccatatcactgtcagcattttggtaacaacagtttaacaagtctttagaaagttccaaaccttccttggtcttcctgtcttatgagctctccaaactgttccaacctctgcccattacccagttacaaagctgcttccacattttcagggatctttatagcaataccccactctccagtgccaattttctgtattaacccattcttgcactgctgtgaggaactacctgagactgggtaatttgtgaagaaaagaggtttaattgattcagttccacagactgtacaggaagcatggctggagaggcctcaggaaactgacaatcatggcagaaggtgaaggggaaacaggcacatcttcacatggcagagcaggagagagggagtgaaaggggaagtgctacacaattttaaacaaccacatcttgtgagaactcacccattatcacaagaacagccaaggggaagtccactcctatgacccagtcacctcccaccaggcccctcctccaacaccgaggattacaattcaacatgagatttaggtggggacacagagacagatcatatcaatatacactacacagtactataattttcacttcaagcagtcatatgtattttaaagatgtactaaggacatatattattctatgtttaccaatatgcatgccatttcttttactttttgttccttccagaataagtttccgtcttgtatcatttccctacagcctgaagaaccttataaaagcacttttaaaaaacatgctggcaaccaattcttttaagtttcttcttttaaatttaaaaatgtgtttatttgactgttcttttaaaggatatattttgggtgtaggaattggaattgacagcatttaaaaaatgtaccactgtcttatggttgtttttttttttttcctgatgagaagaaagtagtcattcagtcattgtttttctatatgtaatatgacttttattctctgccttttttttaagctttcctctacccttgatttacaggtatttggctgctgaaccttgtctttttgacaagttttttgaatttttaaatttatatatttcaccaagtgtttgaaaaatgtgtgtgtatatgtgtgtgtatatatatgtgtgtgtgtgtgtgtgtgtatatgtgtgtgtgtgtgtgtatatatatatatatatatatatatttttttttttagacagagtctagctctgtcacccaggctggagtgcagtggcatgatctcggctcattgaaacctctgctttctggattcaagctgttctcctgcctcagcctcccgagaaactgggaatacaggcacatgccaccatgcctggctacttttttgtatttttaggagagatggcatttcaccatgttggacaggctggtcttgaactcctgaccaccacgcccggccaagaagcaaataattttggaatctgtagtcccttaatggggagaaaaggagctaggatgaaatacataaataagagttaaacatttgacttggtaacgaggtatttgaggggaatagtgcccttcagtgtttattcttgctttttttaaggtaaaggctagaaatacttattttatttatttatttttttgagacggagtcttgctctgttgcccaggctggagtgcagtggcatgatctcagctcactgcaagctccgactcccagattcacaccattctcctgcctcagcctcctgagtagctgggactacaggcccccgccaccacacccggctaattttttttttttttttgtattttttagtagagacagggtttcaccgtattagccaggatggtctcggtctcttgaccttgtgatccacccgctttggcctcccaaagtgctgggattacaggcatgagccaccacgcccagccaaggctggaaattcttaatgtgacttctgagcccttgcatgatctccaatgagtctcatctcctgctactgttgcattcattactcgctcctctctccactttgctatctatactgcaaacacactagccatcttatatcgtatcttattagagcttattcatttggtgaccctgttatttctgctttaatttctcctcttcatttctcgttcatcttcctctggatactttcttttcatcctaatgatctcagccgaaatattattttttcagttatttcatggcctctcctgataagattatatgcaccaatagcatcctcgttttctcttttgtagaatttctcattgttgcaaatagttgtttacttatgaatatctgtttaaccttgctacaatgtaagatgtataatgcagtatttttgtattcactggtatattttctgcatctattacagacctttgcatatagtagatgctcaataaatgctggaaggaataaatccagagatgaattgcttattcaggatttcattcagctaattttcagtaaggaataaactgccaaagattagtgtggagactatccctaccagttcctatttctgactcagagtgaggaagttagtctccaaaactaaataaccaagataaatgatgactgtttttcgtggtttgagtatgacccctggttacaacatagagtagtgccgacaggctataatgtctatccctgaaatgagctatagtgcggaacattatgtccaatatgcacttagtctgttacaaaaattttcatttgtaagaaatactgtatttctaccctgtacatttttttccctattttagctcaattttgattatggttcttttgaaaagatatgtagaaacagtaaaagattacctaaaactataaaaaatggcttcataaggggctgggcatggtggctcatgcccgtaatcccagcactttgggaggctgaggcaggtggatcacttgaggtcaagagctcaagaccagactagccaacatggtgaaaccccgtctctactaaaaatacaagaattagccaggtgtgatggtgggtgcctgaaatccctgctacttgggaggctgaggcaggataattgcttgaacctgggtggcagaggttgcagtgagccgaggtcatgccactgtactctagcctgggtgacagagcaaggctctgtctccaaaaaaaaaaaaaaaaaaaaaaaaaaaagttctataagaaaaaagtaaataaatggagtttagtggtttatatgaaataattcaattcaaagggatgccttacattaattttaattatgtggaacgagtttatactaatcagttgttttaataaatgggaaaattaaaatatagctttaaataggggagatttatttcaaatgaaaggaaaaacatattgacagttaagagtgagacagacataggaatattccagcaattgagagtgttgatgatgcatccttggtgaccttttaagaaaataggaaaatatctatttattgatatttcctcctatgtatgtaactacttttaatggttatttttcagatacaatttaccatatttttatcattaattttttaaatctcctgaatatggagaaaatcctacctttactgttgtgtatgagcaataaaactcattataactagtcctgtaaactgtgaccaccaggtaacttgttgataagttggcataggaagggacctcatacaacagggaattcagctaaaatattaaagttgctaattctgaatcttggcagatggctggaagtccaagtcatcttttttctgagactcttgtgcatatggatggtttttggttgggtctgctatctgaagtatctgacatggtaggtattatgggcaaatgataatgttcgtatttgaatagttgatagcttaatgatttcaaagaattattatacattgaaacacaaggtcagtcagtggctggaaatgaatgcacacatttgaagtgagaggactgctgagagcttgttgggtggttgggacctcagtcctaggttctctctgccccgaccttctggcaaggggaatagagttagctcaggaaacaaaggtaaaagcccattttccacaactaggtaaaccaagtaagcattaaggatattaaaaaggaaaaactggctgggtgtggtggctcatgcctgtaatcccagcactttgggaggccaaggcaggaggatcacttgaggtcaggagtttgagaccagcctgcccaacatggtgaaaccccatctgtatgaataatacaaaagaaaatgagcctggcatggtggcatgcacctgtagtcccagctactgaggaggctgaggcaggagctgagattgtgccactgcactccagcctgggtgacagagagagaccctgtctcaagaaaaaaaaaaaaagaaaaactttaagcatgtttaactttatcagaggttgcctgagcaaaaaacaaacaaacaaaccaaaaaacccaataacaatgatttgcgattaggcagccctcagaactagaacaggttccaagaactatctgctacctgttcacctagcatttatggacagaaaacagagtgggacaaaaaaaaacaacttaattggttacagctaggtgttgtgtctcactttaatcagctgactgtcaacagttgactgaagctcagatgctgtaactaataaactcagctttttgttacatgagtacacgctcaagtttcattcagcatgaatgacttcatattagtttggtctgttgggctcagtacaggagcctagtccaaatcaatggcctcctgcaaattttatttaacaggttaaaagtttagtcccagaatatctgaattagagcataaggcagaaagatgaattctcagtcctacctgctaatgggacgtgagcctttagatattctgctgggcttgaccagaattagctcagagcctgagcatttgttaacttgtagctgttgaagcttggaaaagcaaggattccaccttagtgaaattaaatgacttacccaagatcacaatactaatttgaaattgtgtcagaattgggatctaggcctatgtccattcctaatctagtagatttgctatataataccatcttgaatgtgcaaattacaaccttgttacttcacaaagtgtgattattactgtaaagcttaaaaagttgcttgctacttggaaaagcaatcctgaataattaaataaatcttgttatataaatataaaattgcataaaatttttagaaaactgttgatagagtctttattatttattttacattcatatttattttacatcccatgatagatacttgccaccttatatagaacttttgccaatattagggtttaataaatattgattgaatgctaatatctgaaatggtagtcagaggagttgggcttttcacctctgcgtttgtgtgtgtgtgtgtgtatatatataattgtcaacatgatagaatttatactataatcaaaattaccttggtttttagaagtgatttatagtatatttacttttacatctatctattgagtggtcccagcaataattagtgaaacgtaatgtaagaaccatccattatcttctttttataaatgaggaaacatactccaagatcatgtgaatggaaaaggaaacatgggaaaatcatatttctgaacatgagttgtacattaccagattttgttttaggaagactcactattaaatgtgtgtgtgcgtgtgtgtgtatgttttgattaatgtatgtattatgtgttaagtaaatagtatacatgctcattgcaaatcatttaaaaatatatgtgacgaagaaatgaaaaattgccagtaatctcattgctccatggtcactattgtaaacatctgacatttgttaaatctattatttatgtcctgtattcaaagtagtgtggaggtaggcaagatcactggattagtcaggaaatttgaatattctacctgtctgttagcttagtttttgaccttggtgtagggattccgtgattgccaacatttaatttttaaaattatttcttaccttaccttcttctccagtttatactgttatttctattaaataaatatgactttgttttccagtgagataactagattaacaacattacctttattgtcagtgaagaataaaagatgatgtttcacctagctcatgtagttctagttctcaagaatatgatatgtgatactttttgaaatatttaaagtagtttaaacagtatccatttgactctataaaagcctagctgggctctccatgagggaacaattcgaatagatggtttgtaacgtctttttcagttttaaaatgcagatactttgattccattgcacattgatatatgaactcattcttccttattattatttcccaaaatggtaattattttgcttctagaccagcaagctaatatatcaaaaactcttacatgtaaatgtagttgtttaaaaatatttatgctgtgtaatgtcagtaatttatgagttacagacatgatatcccttatatttttgcataataattcatttttaggaaaaactaagaataaagttattctttgtatttttaccagtcttttcccaaccaagtgttactgaaactgtcataccaaaatctttttaccttttaagattctcacttttgaggctgagaactatgaagctagtattccaatttgcattcattgttgtaatttcaggcagcatgtccaatttacttctactgttaggtgcttgtttgttgtacttatgaagaactaagaaggattttctcgtagcccagagttatgttattttttgcttagtgacaatttttacaagagaccttattataatcaaaccaatgaaatgcatcatagtacctttttcagagtgccagtggcttaggaggtattttttttatgtaaacttgttaaaggcatgtaactaactattgggcaaaattcacccccgatatttcacataggttcttttctattttctgtaagtgttggccggtctgagaaataaagggacagagtacaaaagggagaaattttaaagctgggtatccgggggagatatcacatgttggcaggttccatgatgtgcccccaagccacaaaaccagcaagtttttagtgattttcaaaaggggagggagtgtacaaatagggtgtgggtgacagagatcacctgcttcacaaggtaataagatatcacagggtaaatggaggcagggtgagatcacaggaccacaggactggggcaaaattaaaattgctaatgaagtttcaggcaggcattgtcattgataacatcttatcaggaaacagggtttgaaagcagacaactggtctgaccaaaattttttaggtgggaatttcctcatcctaataagcctgggagtgctgcaggagacgggggcttatttcatcccacagctaagaccgtaagagacagctgcccccaaagcggccattttagaggcctcccctcagggacgcattctctttctcagggatgttccttgctgagaaaaagaattcagtgatatttctcccatttgcttttgaaagaagagaaatatggctctgttctgcccagctcaccggcagtcagagtttaaggttatctctcttttttccctgaacattgctgttatcctgttctttttttcaagatgctcagatttcatattgttcaaacacacatgctgtacaatttgtgcagttaacgcaatcatcacagggtcctgaggcgacatacatcctcctcagcttacgaagatgacgggattaagagattaaagacaggcataggaaatcacaagggtattgattggggaagtgataagtgtccatgaaatcttcacaatttatgttcagagattgcagtaaagacaggcgtaagaaattataaaaatattaatttggggaactactaagtgtccatgaaatcttcacaatttatgttcttctgccatggcttcagctggtccctccgtttggggtccctgacttccctcaacaactaaccaagcttatatccttatggtagaaatagagacatactataaatatttataacaaacaaaattggggtaagaatccttcttttgttctattgtttggtcagtcaataaatatatttttaaaaatttttgtgggtatataatatggggaatatatgtgtggagtactttagatattttgatacaggtgtacagtgtgtagtaatcacatcagggtaaatagggtatccatcacctcaaacatttatcctttggctccttttcaataaaaaaattttgttttctcacagctctcccccaatactctctttacccccttacctgaaatctaagtgctttttgttctcacaagtcctctgtaccttatgatgagtgaagagcttgacattctccaggtattttgcttctagaccacttttttaaaaatcaccttctttcagcagagtgttctcactttgaaatctgtgtaatacctgctttgccatgattgttcttatgcttactgtcattagtgattttttttaaaaaaataagctttataaaagtggaagcctgtgtgtgaatttttctgtgattttttttctttttttgactcagccttatgggtttgaattcatttgtttgagtatctccctttaacaacaacaaccttatgaggtagacactattattatccacacttaacagatgtgggactgaacacagttatatgtttaggtaacttgataaggttatatatccagtaagtacagtgtctggattttaacacaggcattctatttcaaagcccagactcttaaccagtatacagtacttacattcactggtaatcagaacaatggaaactaaactgtgatgcccatcatccgtcggtatgtctgtatctatcttccttctgtctgtctacatacctttatatgtatttagattatcaacagattatctgcagcaaaattgggtacagtaatatctttaagggtcaggggaagataattttgaatttagtaatgtcctatccagacattaacattttagaataagatagacataaggacaatttcaggcatacagggactcagaaactttttcatagatcattgctgaaagaattattaatggatatactctagcaagaagggcaatgaaccaggagaaaataatgggatacaggatgtaatgatgcacaaagaaagcagtaaaacatgctgttaaattcaaatatagttgaaaaatttacatgggaattgggagaggaagtatagaggacagtaaaatagtaagctatggttctggtcctgtttcggagaagatagatatgcttgcttgctaatgttaaacttggttaggaaaagaataaatctacatgtaaactgctataataataccacctacaatttactaagcatttatatgtgccagatactttgttaacattttacatggattataagagatacacacacattcactctatatatgttatatagattatatatttataatatatataacacacacacacacacacacgttttaaaagcatacacaaatgcagggatactgatcgagcaagcatttaatagctgtatcctttaggaaatagaggggaaggggttgagatggggaggtgtgaaggtcaagtggaaaattttgctttatctttatagataaatgcttttacattaaaaatgccatcacatattattgtttttttaaaaacctaaagaagtttaagcagatataccaaaaatatcaatagcaattaaatttgtttttttactttccttttttgtttttgttttttagtgtaattttgaatttcaaaaaagaaaaagccttgagaaacacttggcagcaatgataacatagttggtttttttttgttgttgttgttgttgttaagagaggaggtcttagtatgtttctgaggttgaacttgaactcctggactcaggtgatcctctcatctcagcctcctgagtagttgggactataggtgcttgtcaatgtgtctgatttgtggcgtagttcttaaatcttttcaaacttctattaaaaataataactagggtaactgaaggaagaaacaaatgctgggtaggatacagagaaaagggaactcttatacatggttggtaggaatgtacattaatacaaccattatggacaacagtatggaagtttctcaaataactgaaaatagaactaccatatgatccagcagtcccactacataggatatatccaaatgaaagaaaatcaacatatgaaagagatacttgcactcccatgtttattgcagcgctattcacagtactcaaaaggtggaatcaacctaagtgtccatcagcagatgaatggataaagaaaatatggtatatgtgcacaatggaatactattcggctataaaaacaagtggaatcctgtcatttgtagcaacatggatggaatggaggtcattatgttaagtgaaatgagctaggtacagaaagataaataccacatgttctcactcatatgtggaagataaaaaaagttgatctcatggtagtagagagtagaatagcagttcctggaggctgggaaagggaggaaggataggaagagattggtaaaaggctattgtaattttgtaattacaaaattacatttagataggaggagcactgtagggtgactattgttaacaatttattgtatattttgaaatagctagaagagaggattttgaatatttccaacacaaagacgtgaaaaatgttgaaagtgatagatgtgctaattgtgctgatttcatcattatacattgtatgcattgaaatatcactctttaccccatgtgcacaattattatgttaattaaaaattaaaataggtgacagtatatccccgtatcactgaatatgagtaaaacaatggatagcagcaagaattatgggggaatagccagtgaccaggaatggttaaaggaaagataaactatggtgtattctaagatctgaggaaaccagaaaccacaagcaagtgttcacctccaaaaaaggtaccctcagaatgggagctcaggggtcccatctgagaccagcagttgcagttggtagggagctaacaggttacatacagtttgtgggtacaaggagactgtggaaaggtctgagagaataggggttccctgggccttcagtgttctctgacatactcaataaggtttggtcctacaatggggaaaaatttatagaaatagaacacaatttcatcagggcaggaactctgtgagtaaaggagggaaatcttccaaatactaataggtgaatgaccaggaaagatgcatcttagaaagtactggagatgaggctatgcttgagaggctcttacttttttatatttcttggtaacaacagtaaagctaggagctctattctgtccccatgtcccctcttctaatagttaaagagaaatgatctcatttaaacatatgcattagaaaatgactgtattaaaactccacaaaaatatattgtatcaggtcggtgcaaaagtaattgcagtttcagatagtgaattttaaatcattataactaggctcaaacacatacttattaatcaaaataggaaccattacaatcaacacatcttttgccaatgagaaataagtttgtttattcctgtagtatacaaatctgtttcgggatgccatgaactcttggagtgcattttttgcatcctgctggttgtagaagcactttccccacaaaaagttgccgagatgcttgaagaagtggtagtcagttggcgagaggtcaggtgaatatggcggatgaggcaaaactttgtagcccagttccttcaacgtttgaagtgttggttgtgcaaggtacataccgtaagccaacaaataaaacctcagtaaatttcatagaacagggataataagagagcgttctccagccacagtacaatgaacgaagaatgcacacactcaatccaaagatggcaagaaagaagaaaattatgcatagaaaaacttgaatcaacagaaaacataaagatggtaaaaagttggatatattaataatcaaaacaaatagtatgagcctgggcaatatggtgaaacctcatctctacaaaacaaaaaccaaaaataaaaattagcctgtgtgctggtgtgtgcctgtaggcccagctacttcaggggggctgaggtaagagaattgattatgcggtgcagcaagccatgatcatgccactgcactagcctgggcaacagaatgagacctcatcttaaaaaaagaaagaaagggtatgcagtatgtgactgaggttataatgtgggaaaaagaaaatgcaggtatatgctttttacaagaaatgcccaagtagtaaaaggatgaaacatgaactagacaaatagctgcccagcctgtctccccaaagatactaggtgacttttaatgtgcacacatttgattttaggaaggataaagagatctctaaataaaaattccatttcagttcatagatatggaaataatttaaatggttttaattgcatcaagtttgtgattgtttatatgttcccatgtagtttgggaacattacactctgaatttgtcatccatatacattttatttcttaactttaatttttatctcatttagatttggtgggatgctttgtcgtctttttttaagaaaatttaattttattttaagttccaggatatatgtgctggatgtgcaggtttgttacataggtaaatgtgtgccatggtggtttgctgcatgtaacaacccatctcctaggtattaagccctgcacgcattagccatttatcctgatgctctccctcctcccaccctaccctgacagggtgtgttgttcccctccctgtgtccatgtgttctcattgttcagctcccacttattagtgagaacatgcagtgtttggttttatgttcctgtgttagtttgctgaggataatggcttccagtttcatccatgtccctgcaaaggacatgatcttgtttctttttatggttgcattagtattccatggtatatgtgtaccccattttctttatccagtatattattgatgggcatttgggttgattccatgtctttgctattgtgaatagtgctgcagtgcacacacgtgtgcatgtatttttgtaatagaatgatttatattccttgggtgtatacccaggaatgggattgctgggtcaaatggtatttctggctctaggtctttgaggaattgccacggtgttatattggatgctttgtcttctaatgtagatcattcatatggtcttcaagtcttttgtaaattgctgaatgtttgaaatagtttgctgtgattgaaaaggaagttaaagggggaaaaaagcactggacaactagactctggtatgctgctaccactgacaaactttgttactgcctcttgactagtttcttttttcatttatgccctttgaggctctaatatcccattttggaagcagttcttgtggattggggatatcgctgtatttttctctctgtagaaaataccagtgcatttattcgatctgtgcattagcttatatatttcagcaagtccactacttaataaaatgatcatagtaatcccacttggtatatgacatgatgaagatgaaggtgctatctggttaaagatccaaaagaagaggatttataacaaataatgtttgtctggacatttgaatttaagcatcgaaaaggatattaatagaacagtgtgaatttccaaagtagacataatgcagctatgcacatgatagaataaaaatagagcttttgtcttattttttaaaagcttaggagaattaagacatgatttaatgttttatgatgacagtattttgccagttttttattaccttatttattatatattataatgcattaagttgatactgattatcaactatgtgccaagcattatactgttacatgtgaaatggtaaactgtatttgggcagacgatttcccatggcatttttgcatgtcttgtattagcatttgttctggactatcttttcagggattttggtgcaggaaacagccttgagaaacagacatacgtttggcacagggcagatttttttttttttttctgaccatgataataaagatgtttccctctgaggcaaaggttggacaggttttctggcagctcctttaaaagactggagttttcaaagcttgtggttccttctctgtgatgcaaactcactgtgtgtgtgcagcatccacctgtcttgcttctgctttaaccctgtgagactttggaggagagaggggaccaatacaaacatgaaggtcatgatgtctgttgtgcaatgaataatgaaacctttaatctctgaccctgtaaacttagatattttgctgtctatggaactatcaggctaatttgttagcttgcaagtagggtaaaatatcagaccctttgtagttcttgacccaatggagattgattccttggtattagagcatttcttctctagtggagaagacagaaagtgaaacagttacttacagtatccttgataattgttatgatggtatggaagcacctagctggagcacttaattcagttaactagttaaggaagagtcaaggatagcttaccagaggaagtgacatatttagacctgaaaaatgagaataagttaggcaaaagacagagattagaaaagagtttatacttccagatatgtgtatgcataattattttaggcttcccttttttgttttgtgtttatgaattactttgcacattttaaactcttggaagagacaggaaccatttcatagcctccatgggttacattctgtagttttccttaggtataaggtgtatttcttcatttcttataagctgcatgtggttgatcttttgtttaaaaaaagtatatgtatttaaaaatgtatatatctatctgtccagtttgccaattcttgtctttaaattggagggtctagtctctttacgtgtaattattgacgtgtttgaatttaaacataccatattaccaagtagctttttatttgtcatgtcggttcagtacatttttctttttttttcccactacttttggatgtacatgtcttttatttttattcagcatccccctttattaaccttaaaaaattattattttgctattcttttagtggtaaccctagatattataacatgcatgtttgatttattaaagggtaaaataaatttatacttttatcattttctggacaattcatggatcttcaaacactaatttcatttatccttctcccaaattcagtgctattgtttttgatatattttaatcttttccatcttttaaagctcttctggacatcattgttattgataaacatagtaaatatgtatttagatttatccatgtgtttttcctttttctagcctttatttcttcctgcatgtctaagcttccatctgggctcatttactttctgcctgaaacatagattttagtattttctttgttggaaatctactttttacagtctctttttctttctctgcaatttttaaatttttccttcacgtttaaaggatatattcctagatatagaataacagttggcagttattttctttcctaggtttttaaagtttttgaaagagtctcactctgttgcccaggccaggctggagtgcagtggcacgatcttggcttactgcaacctccacctcctggattcaagggattctcctgcctcagcctctcgaatagctgggattacaggcatgcaccaccacgcctggctgatttttgtatttgtggtagaggacttgtgttgtcatctgacttctgttatttcagttttcgaacaatatgttgctgcttctttgaaggtaatacatctttttctcgtcactttttaaaacaattctgatttttagcacttttcctctgatgtgtgtagatgtgattttttttttgtactagtgaaatggatgatagatcagaaatgattctggtatctatagcttaatttatttaactggccttgaaaatttgtttgtaattctgtgttcaaacactgcttctttatttctttctcctatccttcatgaagtgtaattataggtatgatagccctattcattgtatttcacatccttttttcccccctctgtttttatccttatgtccttactatgtccatatgactgaattttttttgatgtgtattctagttcactcattacttcttcaactgtatgtaatgtgctgttaaacctaccattgaattatcaaattcacttatttttcagttgtggaaagtatgttttatactcttctatggttttttgttttctgctgaaatcttcaatctttttttgtttgttagtttttgaactgggtctcattctgttacccatgctggagtgcagtggcgtgatctcacctcactgtaggcttgacctcccaggctcaagtgatcctcctgcagcggcctcctgaatagctgggactacaggtgcatgctactgtgccacagctaattttttttgtattggtggagatggggctttaccctgttgcccaggctggtctggaactgctgagttcaagcaatttgcccgcattggcctctcaaagtgctggaattactggtctgtgccaccgtgcccagccctcaatcttgtttttcacattagtaattattgttttatgttctggttctgataacttcattatctagtcatttgtgtatctgcttcattatctaggaccctatatgtctgttgctttccttagcttttattcacttctaatcatttagtatggctggctattttttattgatgtctgaataaagtatataaaaattgtaaacgcaatttgaggctttggatactgttatcttccttgagagaagattacttttgatttacgctggtgctggtgtgtaggcttgggaccctggcagtcacagattgttacaatccaactaagaatagggatgatttgaagttgtgcctggtctctgcaaggacttacctatatcggtttttgttttaattgaaatgaaattcacaatagctatagttcaccattttaactatttaaaagtatacagtttagtggttttagtatacaattttcccttcgtatccttgggagattagtttcaggacctcccatggataccaaaatctacggatgctctaatcccttaaggaaaatggcttaatatttacatataacctatgcatatcctcccatatcctttaaataatctctagattacttataatggcctatacaatgtaaatgctgtgtaaatagttgttatactgtgttgtttacgaaatagtgactagaaaaatgtttgtgtatgttcattacagacactgtcatccatttattccccaaatatttttgatccatagttgtttgaatccatacacagagactctatgcatacagagggcataatgcagctctgtatttacaatgttgtataatcatcatctacttaattctagaatacttccattacattaaaaagaaacccctcatctcccaatttcctcatctcatcaacccctggcagtccagtaatctacagatttacatattttaaatggaatcatacaatatggtctgttgctactgccttctttctacttaatatatttggcctttttttgtaacccttacttttggggtatacttacttgcaacaattcttggaagtctgtgaaccctagctttgtctcactgttttcatgggcatattaaaatctttgttcaggttctcagccctccaactgttgtttttacagtgggcatttatcttgagagggaaagtagcctaaagtctgggcttacatctctgggtttcctttctctcttgatctgcctttgcagtcctagttttcttggtagctctctgatgtcttcaagtattgtttttatgttttatccatctttctgattcccagctcattggaattagactatgtaaatatttgctgaatgactaaattcatttattgaaacattatttattgaatggaaaatatgtgccaagtactggaggtatagtagtgtacaaagcaacaaaactctctactctcccacaggttacattttagggacagttgataggaaataaagcatacacctgaaatacatagtatgtcaaaaggtggaaatttctgtggagagcataatgcagggaaagatagaatgagttctagggtgttgagagctgtttcaagtaaggtaagttagggaaaacctctttgataagatgacatgggaagagttaactgaagggagagagccatatggatatcagtcagagggaacagaaagtataaagaccccgagtcaaaaatgagctgtcccactgtccaagcaagagtatggctggagcagaaatgaggtggtagattagctcctagctctgggggttggacagatcatgtagagtgctgtacaagtttggattttattagaacagagttgggaagctgctggagtgtcttgagtagaggagagacatgatctgcttagcactcacattgatcctgttaaaactggtatttcggaataaaccagatcctgggtggtgagggtggatgcagagacaccacctggagattttttcagtaacacagacaagggaggaatactcttttagatcagggtgctagcagtgcaagtagaaagaactgaccagaatttagatatattttgaaggtacagacaacccagtttgctagacatttgaatgtgggggcatgagaaagtcaggagttaagttcttggcctaactgatcagaaggatggaagtgccattgagtgaaactagaaagctcgctagaggatctaatttgcaggtgggataggcagaagatcaagagtttgttcttggccctgttcagttttatatgcctgttgtgcagctaagaggagatgacaagaagtaagttaaatatatgaggctgcaaaatggtctgaggttaatatatacatttgtgagttattagtatcttgttgatactaaaaaagctttgagattgaatgaggtcatttaggggtgaatgtgaatagagaagagatgcaagtactgaaaacagagacaattcaaattttataagtccagggctgaggaggactcaataaagaaggtagatggggctcatgcttataatcccagtactttgggaggccaaggcaggaggatcacatgaggctaggagtttgaagaccagcctgggtaacatagtaagacctcatttctacaaaaagcgaaacaaatattagccaggtgtggtggtgctcacctgtagtcccagctacttgggaggctgaggtgggaggatcatttgagcctgggagatcaaggctgcagtgagccgagattgtgccactgcattccagcctgggcgatggagaccctgtctcaaaaaaaaaaaaaaaaaatagatgggccaggcatggtggctcgtgcctgtaatcccagcagcttggggaatctaaggcagaaggataagttgagtccgggaatgggaattcaagaccagcctggacaacatagcaagactgggtctctacaaaaaaaaaaaaaaaatatatatatatatatatatatatatatatatatatataagctgggtgtggtggtgcacacctgtagtcctagctacttggaaggctgagttaggaagatgactggagccaaaaagtttgaggctgcagtgagccatgtttgcctgggtgacagagcaagaccccatttctttaaaaaaagggctagtagctcaaggatgaagtggagccaatgattttttttttttaagttgggatagattttactgtgtttgcatgctgaagcgaatgatctagcaggtcaaaggtcaggaacgagtcttgtagcagttttcttgaggaggggaacaggtatggaatgtagagggcagaggacataggtggaaggtgggctctgtatagtcctgagggtagttcatccacaagagaagggaaggcagattattttggtaaccctacagggttaatagatagaacatatcaaagttgcctttcatcaataagagtaagaatggtggaggaggtcctgtaagtttaagcagggaagagaagcagcaaaatagtaaatggaaaaggaaatagatctgggaaatggattgtagaggagcactgagataatttcaccttctcatctataaattgagaaagtttaattagatccatctcaagacttttaaatgaataagtaattgactaaccacaccttgaatactataatatacaaattcttgctattacttgctgtgacttcgttgtcaaacagtaaaaacaagtgtttgatatggatataatattgatataaacagaattattaatgttagtgcatataaatatgacattcaaatgcaaatcttattgctagcaaaaattttttgatattaatttctatatatagtttaagctatagattatggaaaacagaagcaatgcccatagttggtagttcacatttgaactacataatgatctcgtactactcctaagaatttctaaaacatatttatggaagctaagtttaggtatgtatgttcatttcagggaatattcattttaggctacttgatattttacttaagcttaattactcacaggtgtgctattgcagttgtatgataaaggaaataactaaattttatgactatccaaaacattctttgtgattttttactatctataatttttttaatttttaatacagtattgctctgatatttagcagtattaatcacttgtcatttatatctgtttatcagtgcatagtgccagtgaagttgaagtcatagatactattcccagtaagttttcctccgtatttagttctggctgcccatgtcatactggaaaaataaggcaacttaaatttattgagtacttttaaagttcattttatgccactataatagaatagtacagactgggtaattggtaatgaacagaaatttattggctcacagttttggaagctgggaagtccaatatcaaggtgctggtatctcatcagggccttcttgctgtgtcatcccatggcagaagagcaaagagagggtgggagagagagcaagagggggcctaagtcatccttttatagggaacccattcttctgataaggagccctctcacatgatagtggcattaatcaactcgctccaccctcatggcctaatcacctctctttaggacccatctcccaacaatgttgtattggggattaagtttccagtatatgtcttttgtgggaacacattcaagccataccaagtaaatagcctaagtgagtcacttttgagtactttacatgtggtagagtctttagtcctgcagctatcctgtgagataggcggtgttattctgaaaagttccatgccaaattatggatttagtaagtgacagggttgggatttatttccaagttattccaaatctaaagactgtgccactattaatgatcaattatagttcagtaaagtatattttgtataacatttgaaaataaaacaatggttatatagtcttgtgcctgtgaattgttcttttttacctggctgtatatcatctttaattagtgccttcctggactcagtcaccttcttttaattagcctttattttatgttcttattagaaacttgataatttctacattattgaaaaaagaaattttgtaagtaagagactgcttaggatattatggagtggaactagagttcgagaattgaatggcattaggttggctcctgattgtgtactttagggataggttatttttgtggaagagttagtaagaattcttttatcaaatagatagttaatagactataaggggtagatggttgaaaactaaatatttaaatgttattttaaagctacttacaaatatactgacatcacacaaatgatatgaaatacttgcttaatagatatataatagtttcaaatatttcagtgcatactatttaggtgcttctcatagaatggtcaacaagaccaatgtggaacttatcattagaagtttatagtccagtgtttgtatataacccaaccctgagagatatatctagcccccacccctagaaacttactgttttccctctgattgtaaaatattcattttacaaaatttgtggaataggaaaaaatataaagataaatggaaaagatttataagcccacagctcagagatacacttcggacatatttcactttagtttctttttcctttatacacatttattagcatgaattaaacatgtatcttttttttttttttgagacagagtctcactctgttgcccaggctggagtgcagtggtacaatcttggctcactgcaacctctgcctcccaggttcaggcgattctcctgcctctgcctcccgagtagctgggtacaggtgtgtgccaccatgcctggctaagttttctatttttagcagagacggaatttcaccatgttggccaggctggtcttgaactcctgagctcaagtaatccacctgccttgccctcccaaagtgctgggattacaggcgtgagccactgtgccctgcctaaacatgtattttataagaaaaatctgtttgctacattttgcttttagtttttaattttcagttcttttttttccttttgtctcagggtcatatatgtcattcttttttctcctgtgactcacttaatctttgtattttctgatccattaaattctgctttaacatgtataatttctttttatttactcagttttgctttttagaaattctcaactgcatgagttaaatgcctgacccgtttattgttattatttgctgcttttaatttttgttgaaagctttttaaaatagaaatttttgtaaacaccttctcattaggatataaacacagttatttgggaagttacattcctttcctgttattagcaaaaaaactttttttttatctcaagcaggttctgtgaattgtagggaccagagaacattattttgttgttctagtcacgtattttttatttctctcaaacaagttttgaacaagtgaatcttctctttttcctttacctcatctggtaatttttgcaatctatttgtgccatacttgcagtcttaaaacattttttttgtttgatttttaccacttttaggccttcagattctaaattcattatgtactctgatgccaaagttgttgcatacttcacagttgtcttcttagtagattattgtactactttggcatcatagaaccagaaggccttagaggtcatataattttgatgaatattattttttaaagatctggaaactggggcttggagaagaagtaaactgatgtacctagctcactaaactaatgtacttctgctaaaaggttttagcagaatctctacttaaaagcaggggtctactgggaccagggcaagcctcagtccttactgtgagatgaaagccaggccatctgccagccccactctgcaaggtgcctactccctgcaaacacagaagcttcttggtgggagcagacaccagacaaacaggccaatgtggggacaggggcggggccctacctgttggtgccactgggctcagtgaggttgcccaggccttggctgcagcagtcccgctgccagcactgggagaggttgaagagcacgagacaggccaccagggccactgtcagcagcatgacctttggcttcaggctcatctgcaagaagatggagcaggcaatgaagcccaggacacagctgcaggtgtagtactggggaggggttggtgtcactcaggacagggccgcatcatcacctcctcttgcctctgatccagcactgaccccagagccccactctccagtgcttcagcatcgtgctcttgccttgccgcctcccttctcaacaaaaagcaacgagatctgaaaaaaaaaaaacaaacaaaaaaaaaaaaccacacacaaagcaggggcctagatctctttccatttaaccccattgaatctgatttgaatctggttagtagttctgtgagaagctattacaggatttcagataataagataattgaaataatgtagctattcagatcataaaactcatttaataatgagttattgagaaactaagtattgtgatctaagtggtgttttaggaaggtgaatttggcagtggtattgagtggtgacataggaagatgggaggaggcaaaaaagagggattttgaaactgcctggcatggttctgtgttccatcccagatatctttaacaaaagctaacaaacagtatatacaactactttccatttttttttaatattgtcagttttcttttatgtggactaaagcattacattactctaacaagtaagataatattgcatgatacaataatgaaatattatttaattcaagtcatatagtcattatttttgaaaaacaaaaataatgagaaaattagccttcagaaaaacattatgaagattaggaataattacaaaaatattttagtatatatttaaattctgcattttaaaacgtctagaaacaataactttttatattatgagttatattcataatataaaaatactctcttcagtgtgctctatttgagaacttacataataacctcatttaacattatgtataacagtgattcaggtgggcagattttatttcacaaagtgcagttataattatggctgaattttgagattcggataaaaaaggaatatagatattagtttttctcatataatctttatcttttattcattcatttgaaagtcattcattacacagttgcattagaattgaagcaaataactagaataaagttatgttttatatcaaagcacttaattcttaaaaccccagatattcaagtattgtttacaattaggatataaaaggttagaaatgatgtgcatgttaactctcatgtaacttttgtgagttacactttgatgtgattgagtttatttctttgtaattatattctataatttttttgccatatgtgtatgtgtgtgtatgtagatatatgtatacatagtgtgtgtatacatatatacacatacatgttaaaatgaggataacttgtaaagcgacttaagttttatggtaaaaatggagtttattattttgttagaatctgagtattacatctaactgggatgtatacattgtagtaattaattcatcagcaactaggatatcttggacatttgacaactcatttgttgagtcccgttttggaggggacattttcttgcatgacagttgcaaactgttatctatcaggcactgaggcaggtactagggtatataatggagtgcagagctacaatacaagctccaccgtccttcagcttgtatgtgtatacacacacacacacacacacacacacacacacatttatttattttaatttgagacagattgtatacacacaaatcaagtatagattatgtagtgctaggaatgaaataatgtatttttatccagaataatggagacatacggtattttaggtagtgtagtcagtgaatgcctctttgaagaggcagcaactcaaactgagaagtataagaaagagtcagtcctgctaagagccagttaagagcatgttagaaagaaggaacagtgagcaaaaggcctgggagttgggagaaagtgtgcctatttagaaaccaactaaaatctgagtgattggatcctttaatgagcaaaggggagagtaacatgattacattggtgaggtagacatgagtaagatttattcaggttttgtcgactgtgagaaacagtttggattctgttacaagagcagtgggaagccattgaaagactttaggctaggggagtgacataatttcttttatgttctaaaaagatcatctgccgcagtgggaagggagcaaaggcaaaaaagtggtgatctagtgtagtgcttcatttatagtggtgacacagttatttttttttattaaataaagtgaagaaactagaattaagcaggaatctgttgtttctagttgtttccagtagggatgtttccatctgtacactatttttagtaaaaatgcataaacctatgttttcatttccgttgggtactgagagtgctgagacctacctgtgggtaaatgtgtgtttagtgcctgttataagaaatttgccaaattgttttctaaagtggctgtgtcactttgtgttcatataagaaatgtgtgaaaggtccagttgttttacatcctcttccatacttggtgttgtcagtctttttgatttgaatctggtagatggatagtggtagcttactgtggtttcagtttgtgttttctgaatgccttatgatattaagtatttttccatgtgcttacagaacatttttatatctttttttgaaatatctgttaagatcatttgtcaatttaaaaatggcttatatttttaattaagatgtgagagttctttatatattctgggtacaagtcttatcagatatataatttgcaaatatttttcttcaggctccggtttgtctttccattttcttaatagcatattaattctgtacaagtctaatttattgatgttttttcttgtccttttgtggcttacttaaaaaatatttgcataatccaagacaagaaaagatttttttcttagaggttttgcagatttaacccttatatttgcatatgatataaagtaaggataaaagttcatgtggctgtgtggttgtttctgttgttgtaaatactgttctttctccattatttatcttgtcacctttgtctcacatcaattgatcatctattgatttgttttataatttatgtgggtttatttgtgggtttatttttggactttctattatgttctgttaatgtgtatgtctattcttatggtaatgacatattgccttgatttttgtggcttccttgtaagtcataaaatctggtagtttagggcctctcaagtttgttcttcagtctcaaatttgttttggctattgtaggctttttgaatttccatatacgttttgtaatcaatttgtgatttttctaacaaaaaaccaggcacaattttgattaggatggtgaaagatgaatttggaagaccaagacatcttctcatacttaaatatggtaaatgtctgtatctacttaggtttttcttttctcttgttattattttttaatcttagcaatgttttgtagttttgagtatacactttacaaatatttagatgtacttactactttgtatctcatctttttgtattataaatgatattctttttagttttaatttattgtttcaattgttctttgccagtataaataaatgtaatatgtttgtgtatattgatcttaaatcctgagaatttggtaaaattctttattaaattagaacttttgggtagattccttaggattttgcgtgtagatgattatgaggtttgtgaacagagatagttttacatcttcctttccaatctttatgcctttaatttattcatttttcttcctgttttgcatttggttgagcatccatgataacactgaatagaagtagtcagagagaacatctttgctttatttatgaccttagtgtggaaaccatgcagtcattcaccattaagtatgatgttagctataggttttttatagatgccttttatgaatatctggttgaggaaattctatttctagtttgttgagagcttttataatgaatatttttgaattttgcaaatgctttttctgtatcttttgacatcatcatgtggcttttcatttttagtcagctgatatggggaattatgtcatttgagttttttttttttattgatgagcaaatcttgcactcctgggataaaaccaacttggtcatgatgtcttttttgttttttaatatgttgctggatttaatttggtatatattaagtgtttttgtgtctacgttcacgatggttatttggctgtagttttcttttctttgaaatggttttctgattttgttaccatgatattgttgactcatgggttttgaaatgttcctttcattaaatttttttttgttttttgtttttttttttgagacagagtctcactgtgtcacccaggctggagtgcagtggtgcagccttggctcactgcaacctctgcctcctgggttcaagcgattcttgtgcctcaggctcccgagtagctgggattataggcggacaccaccacacctggctaattttttgtatttttagtagatacagggtctcaccatgttggccaggctggtctcgaactcctgacctcaagtgatccacctgcctcgattaaaattctgagaaagattgtgtagaattgatagtaattctctcacgagtgattgatagaattcatctgtgaaatcatccagatctggggttttgtttgcaggaaggcttgtaactacaaatttaatttttataatagatataggactatttagattggctatttattcttaagctttggtagtttatgtcactcaatgaatttgtctttttaatataagttgtcaaattcataggtataaagttgttcacaagaataacttatctcttcatagtgtctgcagatctatagtcatgacttttatttgtattagtggtaatttatattggttctctttgcctccctccagccgctccagctgtcccacacctctttgcttcatcgggctagataaattacagaactaaccaacatttgatttcaccagtattgttttattgggttttgtatctttgtttttttccctcttgttctagttatattttttctttgacttattttgagtataacatgctcttcttttatagtttcttaatgtggaacctaaggtcattgaattgaaagcttctatagtaatataagtcttttaatgttatacatttctctaaagcactgttttagctatatctaataaattttgatatgttacatttttatttagctcaaaaattttctaattttcttggtgacttctttgatctataggttatttggaataagtttccacatacttaggtattattattctgatgtatagttttatttatttttaattctaccgtgatcagatatcatactttgtataatttgtcctttaaatttattgagatttcttttgcaatctcagatactcttagcttgatgactgtttcttgtacgcttttagaaggctatattttctgctgttggatggtatgtatgccccaataacaatttagtaaagttgtttgatagtgttgctgaaatcttctatattcttttgtaagacagagtctcactctgtcacccaagctggagggcggtggcacgatcttgctttactgcaacgtctgcctactggtttcaagcaattctcgtgcctcagcctccgagtagcttggactacagctgcgtgccaccacacccagctaattttcttgtatttttagtagagacagggttttgccatgttggccaggctggtctcaaactcctgacctcagtgatctgccttcctcagcctcccaaagtgctatgattacaggtatgagccactgtgcctggcaaatcttctatattcttattggtggattttttttatatggggggaggtgtctttttaatctactgagacaggtgtgttgaaatttcaacaaaaattgtagatttgtctatttctctttcatttgtataggctttgcttcttgctttacaaagctattattagatgcattcacatgtaggattgctgtgccttcttgatgaattgattttttttcttcatatgagaagcatcccttcttccggttactgttctttttataaagtctaatttgtctgatattaatttagctctcatttttttggagtttttttttctgcatagggttatttttgtgtcatgggctggcaaactattgcctatctgctggctgcctgactttatagttttatcggaatggtggcacaccttgtctttacacattccctgtgtctgctttcaagttacaggtgaagaattgagtagttatcatggagaccaaatggcttacaagtctaaaattttcagtatgtggccttgcaagaaaaagtttgctgaccctctgcatttttttgtagacagattgtaatggagtcttgctatatttcgtacattcttgtaatctctgccttttgagtcatagttttagattatttacatttaatgtaattattaatattgccacaattctggcagttatcattgctgtttattccgtatttattacatctgtttttctttctccttttcctattttatgtctggttttggattaattgaatatttgttatgacttaattttacacatactcttgatttattaactacacttttttttttacatgtttaatggtttttctagagtttatcatatgcatcattaacttagtgctctctaacttaaaagtaatatgctacttcaagtttagggttaagaaccttataaaagtacacatatatttctcccgccatgtcctttgtgctgttgttgttactgtttttatttctacgtgcattatcttaagcccatagtacattgttgttatttttactttagatagttatgttttaaagagatttcaaactgtggaattttttctaaacaagatacttaacattctggtgctcttcagttttttgtgtggatttaaaatttctgtatgttttcttctgtctgatgaagttacttacatttctcatagtaaaagtctatgagcaacaaattctgtcttgtagttggctgcagaagtctttttttgctttcatttatgaaatagattaggatttttacttgttagactaagagaatttaaaagtgtatagtcgtttggccattaacacttcatttttaactcattttacttgtcacttgactactggcagtcaggtatccttactatatctattgttatagacatataaagccattataaaggtggttatacagcttttgaaaaattgcgtgttgctttaaatatatttgaaagatgtattttcaagtaggcactttatgatagtcactccctttgttttcccttccctagagtttttatagactgtatttgtagcagcatttgatatactcttgggtacagttatttctataacacaggaaattgccaatatgaattacttgagagaggaccagtgtaaaagaaataggaagcaaataagtaattttctattttacttgcctttgtttcttagctggggtacagggtcattaatgtttattatgttcatgtgtaaattataagtatttttctgttatttactaaacaattatctaaaattcatttattatacatgttgatgggggcagatcttaaaggttaaatgcttggtggagataaatatatatgtcttgggcatggtttctctggtattcatatatttatttatggtattgagaagacatggatttaaattctgatgctaacactagctttgggatcttgggctggttatttaatgtatgccaacctcagtttcctcatttgagacacccattgcacagaattttgagaattaaatgaggctatacacataaattactcagcatgtgataaatgttcacaaaatggtgattcttaattatgtttctgcttacatttttatctctgtataatttcatatagctttatctagaagaagatttatgttttagaaattaataactcaagagctttataatatagattgtgcctactttgaaaaataatttgaattggcttacagtgaaagatagcagtatactaaaggaaggaaagcaaaaactagtcaggaagacagaataaagaaaggagataatgaagacaaatatagttatcaaaatttgatccttaatttttaatttcctggaaaccaaggctaaaaggataatatggtggcttacactattcttattgtatattaaaagaaagcatactagttcattaaggtgcttaacattttcccccagattttatgataagaaaaatgtatttctttataaagggacactgtcagtgtaactgatgggagaagtcacctacaggtcagatgcctaaggagatgagaaattatactactgatctcatactatattcttaacttgtttatattttaaagggctttcatacttttttcaatttttatctttgtgtcctgtataagttatattaaatataatttatagtagagctatagtagatcctataaaagtatgcgatcatagaggagggtagtattaattttgaaaagaaatgtttcagatgatctcatcaaggaggtggaagttaagttgggccttgaagacattactaaggtttagagagacaaaagtacgtacatctgtgtgtgtatgtaaatatagttacctatacaaaagaaaaagtgtgagtaaaaacaaggaaatatagaataatgcagtggtcacaaagtagaacatggcagaagtgagcttaggaagactgggcaggtcagatcttgaaggatcatgaatgctattaagaaatttggtctttctttagaaaatcgcaaggctctttttcttccaccttttattttaggtttgggggtgcatgcgcaggtttgttacgtgggtaaattgtgtgtctttgggggttggtgtacaagtgattttattacccatgtggtgagcatagcacccactaggtagtttttcaacccttgtgcacctcccatgctccactctcaggtaggccctggtgtctgttgttccccttttatgtccacatgcactccatgtttagctcccacttacaggttacttccattttctgatggacttaaaagtgggagcttatttgtgttcatgtgataatttgcttaggataatagcctctagctgcaaccatgttgttgcaaaggatgtgatttttttttgttatggctgcatagtattccatggtgtatatgcaccacatttctttatccagcccactgttgatgagcactgcattgattgcatgcctttgctattgtgaatagtgctgcgatgaacatacaagtgcgtgttgctttttggtaaaacaatttttattccttttgatgtatacccagtaatgggattgctgggtcagagggtaattttgggcccggcgtggtggctcatgcctgtaatctcagcaccttggaaggccaaggcagatggatcacccgaagtcaagagttcaagaccagccagaccaacctggcgaaactttgtctccactgaaaaaaaaacaaaacaaaaattagccaggtgtggtggtacacacctgtagtcccagttacttgggaggctggggctggagaattatttgaacctgataggcggagtttgcagtgagctgagattgtaccactgcactccagcctgagtgacagagcaaaactctgtctcaaaataaataaaataaaataacataaaataaaataaaagtagttttgttttaagtcctttgggaaatctccaaactgctttccacagtagctgaactaatttacatcccaccagcagtgtataaacatttccttttctccacaactttgctaacatctattatttgctgatttttgtttttagtagccattctgactggtgtgagatcttacctcattgtgattttgacttgcatttctctgatgattagttatgctgagcaaatatacttgttggcctcatgtatgtcttcttttgagaggtgtctgttcgtgtcctttgcccatttcttaatggggttatttgttttttagttgttgatttgttcatatttcttatagattctagatattagactttttgtaggatgcatagtttgcaaatattttctcccattctttaggttgtctgcttattttgttgatagtttcttttgctgtgcagaagctctttagtttaattaagtcccacttgtttatttttgtttttgttgcaattgcttttggagacatcatcttgaaatctttaccaagacctatgtctagaaggctatttcttagatttttcttctagggcttttatagttttaggccttacatttaagtcttgagttgattttttgtgtatggtgaaaagaaggggtccagtttcaatcttctgtatatgtttagccagttaccccagcaccatttattgagttagggagtcctttcctcattgcttgttaatgttgactttgttgaagatcagatggttgtagatgtgtggctttatttctgggttgtctaacctgttccattggtctgtgtgtctgtttttgtatgagtacctggttactgttgccttgtagtacggtttgaagttgagtagtgtaatgcctctggttttcttctttttttaatgcctgtgacgtctttgttttagactgagagctctagtgggagagtgatgaattgaataaaagagatgtctcatccttttatctctcactagtctcacttgtctctcttactagtctcacttgtctctcactagtttattttgctatcgcttacattttcttctccatcttcattttgttttttacagactcaggttattatattaggttattctaatgatcagtgagaggttcttttctgttttaatctgttttacatactactgacatgctgagttgtttggaaaaaattttaattagctccttattcctattctaagtgaacaaattcttttgcattttgattttttttttcttgaagtctgatataatttggctctgtgtcccaacccaagtctcaccttgaattgtaataatctccacatgtcaaggacaggaccaggtggagataattgaatcatggggacagtttcctccatgctgttctcatgatagtgagtgagtcttatgagatctgatggtttcataagcatctggcatttcccctgcttgccctcattctgtctcctgctgccctgtgaagagatgccttctgccataagtgtaagtttcctgaggcctccccagccatgtggaactgtgagtcaattaaacctcttttctttataaattgcccagtctcaggtatttcttcatagcagtgtgagaacagactaatatagagcctccttgtaatctcactgtatttctctgctttctgtttgctgactgttccctgctttgtttagctagtgtgttcactgctctttatgttttatatctcagttttttctctagtatggggcactttctgttttcaaatgcatggcaatatctttcatagttatccatacccattgcaaatctcatcttttcatgaagatgtattttattggactgctattgtactatcctcttttgtttctgaactgttggttaatacattttagcaaatgattgttccataattgttttatatattctttcaattggccagctagattgttagcttctaaagcagcactaccaatagaaatataaaatgagccagacatagttttaaattttctagtagccacatttaaaaatcaaaagaaacacataaaattaacattaataatatattatattaaactcagtatatctgctactttggtggttagctgatattttgacagttacctacctaaaatgccaagatagagaagtattctattactacaaatatagtcacacccatcctcttaccctcataaccctaactcttggtaactactactctcttttctgtctttattatgttgtcatttagagaatgttccataaatagaatcgtattttatgtgatctttggagactgcttttcttcactcaacataatgtctgtgatatttatccaggttgttgtgtgtattgacagttggttcctttttattgctgagtagtattccatggtatggactttccacagttcatttagccatgtactttttgggagggcatctagttgtttctactttatggctattacaaataaagctgctattaacaattatgtacaggttttgttgtagctatgtttccgtttccctaggataaattcccagtagtgaaattacttgataatatgctaactgtatgtttagttttgtaatatactgccaaactattttcagagtgattgtaccattttatatccttacaagcaatttatgacagatccacttttttttttttgcatccacaccagcacttgctgttactactgttttctgttttaactgttctgatatatatgcagggataactctttgtgccatccatagatcctctttgatcaaatgcgtgttcatgttttctgcccattttctgattcaatggccagcttctttactgttgatttctgttacattctagatgagtcctttatcagatatgtggtttacaaatactttcttccagtctgtagcttatattttcaactttttaacatgatctttctcagagcaaaagtttttatttttatgaagtccaatttattaatgttatcttgaatggatcctgcttttggggtcatgtctaaaaacttttagccaggctctaggtcctgaatattttctgctatgttatcttctaaaagttttatattttacatttaaactatgattaattatgagttaatttttataaaagatatgaaatatcttataggtggaggttcatgttttttggcctgttgataaccagttgctctgacattgtttgctaaaaaggttgttcatcctccatttaattgcttttgtatcttttttgagaataacttgttgataatcatttagggctgtttctgggttctcgcttatgcttcatgatctatgtgtctatcaactcaccagtgctacagggtcttgaattattatagcaagtcttaaaattagagagtgattcctcccactttatttttgtttgttcaagaaaaaatttaaggtattgtaattcctttgcctttcatataaagttcagaattatcttgtttacatctactaaaaatatttccgggatttatagaaaatgcattaaacttatatgttaatttgaggagagttgatatctttattatgttgaatattccatgaacatagtatgtttctatatttatttaggtctttgatttctttcatcagtgatttgttgttaagaatgatagtcttgtacatagtttgttaaatttacatagacaattaattttttagtgacagtaaatggtattttaaagtttctgtttccacatgttccctgatagtatatagaaatagaattgacttttgtatgttgatcctgttacctagctaaactcactgaatggttacagagatgttttcctagattccttggtgatttctttaggccggttcatgtcatatgcagatggaacagttttatttcttccttttagatctctgtatcttttatttcctttgtttgccttattactctgcatagaaattccagtactgtgttgaatagcagtggttgtacaactgtcaacactgtctgcattcaaaactttttcatcaccccctacagaacctttatattcattaggcaatacccccacatttcccccttcctcatctttggtaactctaatatactttctttctctatgaacttggcctgttttagatatttcatgtaattgcagtcatatatttgcctttttgtgtctggttcatttcacttagcataatgtttcaagattaatccatgctgtagcatgtatcagaacttcattcatttttatggctgaataatattccattgtatggactatattattaaaagttattataaatttttaataattaagactgtagtattgggcttctttctttttgtttctgcttattcatattcctttgttcagttacagcaatggtgagaggacaattttctcagaaacttttcttgtctatttgactgttgagggcacaaacaattagtctataacattatgtgttatatatgatatataacacatatatatgtgtttatataatgatatataaacatttagtctataacaccatagtctataacaccactgctgtggtgtggatggctgtaatgggagtccaagaaaaaccatctttgtgggtactgggaggagtttctggattaagtggtatctaaattgatatttgtagatttaatggaagttaacaaatccagagtttgagagggaaccctgtatcatgcatagggagtaacacatacaaaggattttctatgaagtgagggatggtattgtagaaactttccttatggcagtagctgggaattagaaaaaactgaggctgggagttaatttgggctttctgaaaagtgttaccattttagagtttatccaaaataacaaattgcaaagaaatccagcagtttaacaattgttcactttgatttaaataatgaacattgaattattgcgtatgatcctaataatctaagatttcaaatcaagatatttaaagactcactctatacctaaaacatacacaaaaggtacttaaattgctagtatttataaacctcagtgctcttagaagacaacatgtttccaagtcagcattttgtatttcaaaatttttattcagtaaagtttatttactttatgtaaataaaagttactgcagtttaaaaagctcagctgtgatatttattttacacaaattcacttaagactgattcttgagtagcaagcatcattgtggaccacttctctaacagcggtagtaccttttagaattttttgaaggcctggaggaaaagaacaccgttaactgtgcaaatagagtatcacaaagatgcattcagatttgtaggatgtctcaactggtttatccttctcttttatatatggtcacagtgatttgacacatcttttcgaagaacagatttttagtatttagctttgttttttatttagctttttcagctttgctacatcatttcctttgctttttaagatgttttcttacgtgtttttaaagtatttttatttgattttcttatatttgaaccttcaaaatcttctttcttgcttttaactttaacaaattcttttaaattatggtctactacatgtagatgtttcatttcttacccataaaaatcattgtttcctcattttactcttcatagagctttataaatatcccctctctttctttctttcttaaatctacacctctgacttcatagcaagtgattaagtgcattttgtagtctatattaggatcctggatctaccgcttacttatgtgtgaccttagtcttgttgcttaacctcacttatcttcagtttctttctatgaggataatgaagcctcactgtagttcttcataggatcgttagagaattgtttaaataatgaaggtcaactctttttacttattatatgctttagttgctaataagcaactcattacaagcaaataaatattttcctaatcttgggatgatattttcattcagcagttagcctctttaacacgaatgtattaaaagttaacaataaaggttataaaaccatctcactgtagaaagcataggcccattacaacatctgtagtaaatatttttactgcttccggcaattaaatcagagagctaaatgatacatagaaaggggcaatgtgtttttggctgcgaaagatgtacactcaggcttcacataacagagcctgattgttagaattacatatattaattgttaattcctttcacagccgactccaccagcacccctgcaatgagcccatctctgctatttacatatgtaattatttggctctaccagactctgctaaagcagttacaactggtttaggagattcatctaaaaaaattctccaatactctacaattcaagtgtataccctttattctacaaatttatacagaggcccataggcataaacctcattatcggcttctattggttcaatcaataagtgtccgtattgttgattttccaaccttttgtttttatatagtttatttctcgagaaccttttctgagttaccaatcactagtgtacaagattcacagtagtgacagactgaagtcagttgggctcataataatgaacaaaaaggagttttatagtaagacaatggtatggtaaaaaagtgatgtttgagttggtttcagtaaatgtccaagtgatatctaatagagtgtatgatccataataaatttgattttgctggaaacataagacttaagcttgctgaatttcatgatacttcagaggtattcgattggtgactactttttttctttttttttaatagctggaagctggggtggttagagaactgataattgctaactttaactgaatgctaactgtatgtctcccattgtgcctaagtacttaactcaattatctcatttcatgctcccaacaattttattagacaggaactttttttttcaggtttgtaggcacatgtgaaggtttgttacataggtaaactcatgtcatgggggtgtgctgtacagattatttaatcactcggttatgtattaagcccagtacccaatagttatcttttttgcttctctccctcctcccaccctccaccttcaaatagaacccagtgtctgttgtttccttctttatgttagtaagttttcattatttagctcccacttataagtgagaatgtgtggtatttggttttctgttcctgcattagtttgctaacgataattagcctccagctccatccatatccccataagagacatggtattgttcctttttatggctgcatagtattccatctggtatatgtaccacattttctttatccattctgtcattgatgggcatttaggttgattccatgccattactattgttaatagtactacagtgaacatttacatgcatgtgttttcatagtagaataatttgtattcctctggatatatacccagtaatgggattgctgggtcgaaaagtagttttgcttttagctgtttgaggaatcgccatactgctttccacaatggtaaaactaatttacactcccaccaacagcacataagtgttcccctttctttacaacttcaccagcacctgttatttttgactttttaataatagccattcttcttggtatgatatggtatctcactgttgttttgatttgtatttctctaatgatcagttttattgagctttttattcataagcttgttggccacacttatgtcttcttttgaaaagtgtctgttcatgtcctttgcccattttttagtggggttttttttctcttgtaaatttaagttccttatagattatggatgttagacctttgtcagatgcatagtttgaaaatattttcttatattctgtaggttgtctctttactccattgatagtgtactcatagtgtacaagtgttcccttttcttcacatttttgccagtgtttattatgcttgtcttttgaatataagacatttttaactggggtgagatgatatctcattgtagttttgatttgaatttccctgatgatcagtgatgttgagtatctttcatatgcccatttgccatttgtatatcttcttttgagaaattgctatttaaatcttttgctcatcttggtttggattattagatattttcctatagagttgcttgagctccatatgtattctggttattaatccgttgtcagatgggtagtttgcaaatattttctcccattctctggattgtctcttcactttgttgattgtttcttttgctgcacagaagctttttaacttaatgtgattccatttgttcatgtttgctttggttgcctgtgcttgtggggtattgctggtgaaatttttgctcagaccagtgccctggaaattttcttcaatgtgtttttatagtagtttcatggtttaaggtctgagatttaagtctttaatccactttgatttgatttttgtatatcatgagagataggggtttagtttcattcttctgcatacagatatccagttttctcagcatcatttattgaagagattgtcttttccctagtgtatgttctaggcacctttgcgaaaaatgagttcactgtaggcatgtggatttgtttctgggttctctattttgttacattggtctctgtgtctgtttttatgccagtaccatgctgttttggttactatagctctgtaatataatttgaagtcaggtaatgtgatttctccagttttgttctttttgcttaggatagctttggctattctaggtcttttgtgattccatataaatttgagcattgttttatctatttctgtgaaggatgtcattggtattttgatagggattgcattgaatctatagattgctttggatagtgtggatattttaacaatactgattctttcaatccatgaacatggaatatttttctattttgggtgtcctcttcaatttatttcatcagtgttttatagttttcattatagagatctttcacttcttggagtacattaactcctaggtatttaattttatgtgtggctattgtaaatgggattatttttaaatttctttttcacattgttcactgttggcatataggaatgctactgatttttgtatgttgattttgtatcctgtaactttactgaatttgtttattattctaatagttttcttgtgaaatctttaggtttttttcaggtataagattctatcatccgcaaacaaggataatttgacttcttcctttcccatttggatacctttttctagctttctcttgtataattatgctaactgggacttccaggactatgttgaataacagtgttaaccgtgggtatccatatcatgttccagatcttagagaaatgacttttagtttttcgtttttccccattcagtatgatactagctgtgggtctgtagtatatgctttttgttgtgttgaggtatgttccctctgtccttagttttttgagagtttttatcatgaagggatgttgaattttatcaaatgcttctttaacatcagttgaaatgatcttgtggtttttcttcattctgctgatatgatgtatcagattgattgatttgtatatgttgaaccgtccttgtatcccagggataaatcccatttgatcatgatgggtgatctttctaatgtattgttgaatttggtgtgctatgttttttgttgaggatttttgcatcaatattcatcagaggtattggcctgtagttttctttattttattttattttttatgtgtctgtgactggttttggtatccgggtaatacgggcctcatggaatgagtttggaagtattccttcctcctccatttggaagtatgcccttctcctctatttttcagaatagtttgagtaggattaatattagttctttaaatgtttggttagaattcagcagtgaagtgcttttctttactgggagacttttattacaacttcagtcttgtagcttgttattaatctgttcaggttttggatttcttcctggttcaatcttggtacttgtatgtgtggagcaattcatccatttcttctagattttccaaataatttgcgtgtggttgctcacagtagccactaatgatcctttgaatttttgtagtatcagttgtaatgtctccttttttatttctgattttatttatttggatcctctctcttagtctggctaaagatttgtcaattttgtttagcttttcaaaaaatgaactttttgtttcattgatctgttgtattgttttcttcatttcagttttatttatttctgctctgatctttattatttcttttcttctactaattttggatttggtgtgctcttgatcatttagttctttaaggtgcagcatttgattgtctgtttgatattttttctcttttttgatattggcacttataaacatccctcttagtactgcttttgttgtatcccataggttttggtatgttgtgtttctgttattattagtttgaagaaaattttcaatttccttcttaatttcttcattgacccgcttgtcattcaggagcatattgtttaatttccatgtatttgtatagtttctgaaatttctcttgatgtttctagttttattccgttgttgtcagagaagagctttatattatttcatttttttggaatgtctcaagatttgttttgtgacctaacatatggtctgtcttttcagttgatccatgtgctgaggaaaagaatgtgtattctgcagctcctggatgaaatcttctgtaaatatctattagctcaatttggtctgtagtgcagatgaattctgatgtttctttgtttattttctttctgaaagatgtgtccagtgctgaaagtgaggttttgaagtctccagatattatggtattggaacctatatttgtctttagctgtaataatatttcctttatatgtctgggtgctccagtgttgggtgcatatatattgaaattgttatatcctctcacttaattgacacccttatctttatatagtgaccttctttgtctctttttatagtttttgtcttgaaatctcttttgtctgatacaagtatagtgacttctgctctttttttggttttctttggcatgggatatctttttccatctgtttattttcagtctttgtgtgtctttataggtgaagtgtgtttcttttaggcaacagaccaataggtcttgctctttcatccatttagttagtctgtgtcttttgattggtgagtttagtgtatttacattcaatgttattattaagtaaggatgtactcttgccattttgtttttggttttctggttgttttgtggtcttctttcttgcatttctgtcctctagtgaagatgattttctctggtgatttagtttcttgatttttattttttgtgtgtccattgtataatttttggtttgaggttaccatgagccttgcaaatactatcttatcattcattattttaacctgataacataacactatttgcataagcaaacaaacaagcaaaaagaaaactagtaaaaacttgccttaacttcatttccttgctttttaactttttgtctgtttatatctcattatactgcctatgtcttgaaaagtagttgtagttattatttttgcttggttcatcatttagtctttctacttaggataaaagtagtttgcaaaccacagtaacagtgttataatattctgtgtttttctgtgtacttatattaccagtaaggtttgtattttcaggtgatcatttattgcttattaatgcccttttctttctgattgaagtaccccctttagcatttcttgtaggacaggtctggtgttgatgaaatcccttagcttttatttgtttggtaaagtctttatttcctcttcatgtttgaaggatattttcactggatatactattctagggtaaaaggatttttccttcagcaatttaaatatgtcatgccactgtctcctggcatatatggttttcactgaaaagtctgctgccagatgtattggagctcctttgtatgttcttgtttcttttctcttgcagcttttaggattcttactttattcttgacctttgggcgcttgattactaaatgtcttgaggtagtcttctttgggttaaatcttcttggtgttctataaccttcttgtacttggatgttttctctaggtttggttagttctctgttatttgaaggtttactcagaataaactttctacacctatctgtttctttacctccttttaaaggccagtacctcttagatttgcccttttgaggctattctctagatcatgtaggcatgtgtcattggtttttattcttttttctcctctgtgtgttttctaatagcctttcttcaagctcattaattctttcctctggttgttccagtctgctcttaaaggacttgatgcattcttaagtatgccaattgcatttttgaactgcagaatttctgcttgatttttaaaaattatttaaatatctttgttcaatttatctgatagaattctgaatgccttctctgtgttatcttgaatttctttgagtttcctcaacacagctattttgaattctctgtgaaaggtcacacacatatctttgtttctccaggattgattcttggtgccttatttagttcatttggtgaggtcatgtttttctggatagtgttaatgctagtagatgttcctcggtgcctgggcattgaagagttaggtatttattgtactcttcattgcctgagcttatttatagccacccttcttgggaaggctttccagtgacactgtgattcttgcagacttgtagaggtactgccttgatggttttgggcaagatctgggataattctctagattaccaggcagaatctcttgttctctttccttactttctcccaagcacacagagtctctctctctttctgttctgagacacctaaagctggggctggtatgacgtatggcacaagcactcctatgaccaccaccaccatggctgtgctgggtcacacctgaagcaagcacagtgctgggtcttgcccaaggcctgccttaatcgctccttggctatagcctatgttcactcaaggccctagggctctacaattagcaagtaacaaagccagctgggcctgtgtccttctcttcagggtggcaaagtccccctggccactagtgggtccagagatgccatataggagtctgggactagagtcttagaaatcttagaaaccttagaaatctacctggcattctgttgtattgtggctgagctggcactccaaccacaagacacagtccttccccttttccacttttccccttttcccctttccaaaggctgaggagcctcaccccttagccactgccactcctggccatgaggagtactgccagagtaccaccgacattcccttaaggaccaagggctcttctatcagcttgtggtgaatgctgcctggcctggactcaaccatcagggcagtaggttcccctttggctcagggcaggtctagaaatgctgtccaatagtcaagtcctagaattggggaccccaagagcccacttggtgctctaccctactgtagtgttgttggtacctaagatacaagacaaagtcccctttactcttctgtttttatcaagcggaaggggttttgccccatagccaccacagctggtaatgtgcatagtctcacctgaagccaacaagtctcagaaactcaccaaggccctcagcgtagtaccttggtatcactgctggttattcaggacccaagggctcttcagttagcacatgatgaatgctgcctagactgggtcctttccttcaaggcagtgggtttccttctggcccagggtgtatctagaaatgtcatcccagagctagagcctggaacaagggcctcatgacctcagggtgccctattcttctgtggcagaactggtaaacaagatgcaagacaaactcctccccactcttccctctcctcttctcaagtagaaggaaggggtttcttttgtatccacaagctgtgcagtctggggttaggggaggggtgatgccagcattcccttagctgccccagctggtatctcagtgtgtccatgccactttagtccactgtgtttgggcctagttcagcactaggacttacctatgaggtacagtccttatggcctagactgcctttcaagtttacttaaacaccaagagcactctggcctttggtactgaggttttcaggcactcaggtttggactgctggtatcagtgattcccctctggctagggctggttgagatgccttcttgtgggtggacatcagcttagtttggtcaggttttcctttatgctatagcaagatggccccaggttcagtgcctcacaattgctctgttctcccttcaccagcacccagagatgctcttggcaccaagccatgctgctggagtcagggaggggtggcgtcagagactcagaactgttttctatcttttcagtgtctctttcagtgatacgaggttaaaaccaggttctgtgggtgctcacatgatttttagctcttatgaagaagcttttttctgtgtagttgtttgttaacttagtgtccttgcggtagggttagagggacgatctgtggagttttctgttctgccatcttgcctcacctccctcctaaaaaatattcttatatgagattgtaatgtttatatgaacttgcatgaagacagaattcttgtgtttggatcctgagtctcttacccattttgtaacattcttcaacatacttttaactctgtgcctatgattccttatctgtaaaatgaagataataatagtgtcataatagatgtaaaacatgtaaaacaatactaaatgccatgtaaggttaagtggtggtattattactatttatcctatttacatcatattctgtggtcatctgtcagtatttgtgaatacctttcagtgacaggaaattaattttacttcttgatcctaattctactccctgtctgttcctaatcttgttttgcctttgcttcctcttttctcatctactcatattttatgtcttccttcatgctttatataacttttagccaccttcaatgttttttggaataaagtaatgtatgcatacatacatatacatctttgttcctagaatttagcactgttagtgcatggtttttatcttggacattcatatattctagttccagaacagtaacttctagaacttaataatttattaaggaatcaatgacttcaaatttgtcagacgttgtatatgattattattttattcctaaatcttatcgttctttagaccaaaaggatatccagtttgacagtgttcttttttaagaatgatgcttttaactgaatataatagttcctatgggattcgatcaacagagagtaaagagtgttattatgttattttattctatgtgtatttgtctattactgtacttaaaataccaaatgggaggggcagtatgactttggactcatttgccataatgctgaagttaaatgtgttgctgttaaatcagctttcttttacccaattcacatttgtgctttaaaaaaaaaagcattacaagaccttgcatacttctgttcaacttattttttaacattcatttcattatttcaatatttcttataagttgtatgagtttcatatttctttatcttctatatattgagattatgccccagttatatctctttgtctgtaagactagtaatgtcaaaaaaaatgaatttcatgtcttaaaatttatccttagtaaattctgtattttctgttgattatcccttttaaaggccaaaccctctttttaggaatttttcctgaatctcactcaggaatcacatgctgtagtttgctctattttactagatttgaaatcacccttttccatttatgtgaaaattagatttctgtttgctagtttcgatgctcacaatgcctttcacttatttgtagctcttatacttttgatcaaaattaattttataccagaatccttgaaattttttagagtagtagctttgaattcttgttattatttcattctactgtcatcgataacctcccatgttaacactattgtttctttctgtttactttcagctggttggtggagaatttgacttggagatgaactttattatccaggatgctgagagtataacatgtatgacagagcttttggagcactgtgatgtaacatgtcaagcagaaatatggagcatgtttacagccattctacgaaaaagtgttcggaatttacagactagcacagaagttgggctaattgaacaagtattgctgaaaatgagtgctgtagatgacatgatagcaggtatggggttgtctgacaggaaagtataacttaaatgtttataaagtttcacatacttctctttatattctataggtaatgtagatttgttgacattactttgatttaaaataaatggaaatgtgtggaaattttactttttatattaatggaaaacctgaagagtgcaagaagaaaaacatacttactatagtagacaaacataattactaatgttgttttctaaattttagaaaatctcagtaccatggagtgctatgaaatctatcagaaaaataaacattatttttatgtagtatttcattaagcttttacataattaaaataccacaataggtattacagttctgtataatgagcattttaccaaattcttctagttctgtgcccctcaatctggcatatatgcaactatgacaggaggtactaaaagccttatataagcatggtgtatcttttggatatgtccattttggaagaaacttttgtattaaaataaactaatatattatgggctagaacataaaattcaccaagaatttcaagataaaaatactaatgttttgcttgtttgggtgatttcaaacaataactttgaaatctataattttttcaccaccaaccgtttactaccttgcatgctcattctcctgtgtggctagatgcatttcagaaaagtgttttgaatattattccagagcaaatatcattccagaaaataagtttaaagtttaaaatgtttattttttgtaagccacgaatcttcagcctaagtatcttctgacataaaagcattttcataattataaaagtgctgatattaccctccacagtattatacctgatcctggaaagtagttcagataccagagaatactcttttaacattttggcttatgcatttcattatttttaaaatttatggaacaaaacattaaacaagaatggaatgaaaaatggcttaaaaaagaatgcagaattgcaaaaagcatgctttgaatttaaatatttcaaaaaatttgattttctgagaaaatatattaaaaatcatatctaattaccttcagggtggcatatatcttttttttagaatgatttagcagtccctgtattgggtactgatggctaacttgatgaaaaatgagattcagacatctatttcttaaaatacctttttaatattaatagtagcatttctataaattctagaggtacttaatagaaatttattaatatagacttacatgtacacatgttttatagaatatcatatgatcttttaattcttacatctgagcttaagctcttaattttttttttgtaaattggctgctactctatggagtgcagtttagagaatgagccaaaattacatgcatagtagtttactggtacataattcatcagcactgaaatgtgaaagtgacagtgaagatgattgtaccatagaagttcatatcttgacattgctgttacataaagctccttaattcttttatctttttctcagtaataatattaataacaaaatttttcactttttgtaatttctagcatttcccttcaaaagagcttgatgatggaaggatatgagaaaagagaataaatgtcagaaaaatacctctgtcttactttttaatagagaaattaaactttacatattatactaaggaagaaccagtagccactaaaacacgactaacagttcatatctgaatgtattgtagtatgttaaattcaatggggtactttttatttaataatgtagtaaaagtgtcactaaaaggtggctaaattaaacattttataacaaattgatgagaaaatttcttggtcttagtattttttcttttaaaaaaaatcatttctaattactttcaatcttgttctccagcaaagaagaccgtctataataaaattaaactgagctgcttggttgtgttacatatacaatatataagtaattcgtattttttctcttttaaaaatgatttctgattacttttaatcttgttctccagaaaagaccttctgtaatagaattaaactgagctgcttggttgtgttacatatacaatatgcaaggaatttttaaaaatttctaattaaatacaaatttaatagattactttttgtgacatacatgggagataagataaagatgaagtcttgtataacctgaaaaaatttaaacgttgcaaatattttttaaagtttttttaaaagtattttatgtaaacctttaagaaatcttctgtaaaggttgccattgcagctaattgcttaaaaatacttcatattatagcaacattaaatggactaagaaaaaaatacttcatattagcttaggatttttatagtacttaaatttttttgtagaaacacactttttgacctatatgtactaatattttaatacatttttgttgcttcagtgatgacatgttttatttcattaaaatatcactctgaaagtggcatatccactgtcacaattttgtcatagagattattgtgtgttaaataaaattatttaattattaattgattattaattgatgaagataagcatactaagtttccattttgaaatatacaaatgacaaatattttttaaagtctcaaattccagttattaatctgtgatatgatattgaataatatacattatatatcagtactaagtatttcagcttaccctaacctaacctttttattaattgattataagcttttagaatatatatgtgtattgctttgtaataacctttgtagtatgtttcattcttaagaagtgctttagaaattgagaaaacgaagtataaatgtttagatgttcaatttcttgcaaagaacaatgacagaaaaagtattaatcacaatatgtagagaaagcaatcagagacaagagattaaatgtataatttttctcattattaggtgtgctggtgtgtctgttatatgcacataaacactcacactagcatgatggataccactattaatgtgtttaaattacacttctacttatagactagtgtgtaagagtgagggttctgaagctatactgtctgggtttgaatcctgattctaccacttgctaggtctatgttcttgggcaatgggaataaattatctgtgccacaatttgctcattttaaaaggggataataatggtacttacctcataggcttgttaggaggatttgtgaggttagtatctgtaaaccacttggaataatgtttcacttggagtaagtggtaaaaattgctaatgggccaaggaatataccaagaatatattaagaatagataattctgaaagacaatatagtcagctgttactttttcatttgacaataaccagtttgcaattttaaatctttgtacatttgcatattttacctacctttccctgcacacagcaggctgtgttgtggtgtgtgtgtgtgtgtgtgtgtgtgtgtgtgtgtgtgtgtgttctgggaatatgtaaaatctattttacatttctgctaagacagcttaattgcggtggtaatttaatgggggaaaatcatgtaattcaaataaattcttttggttatttaatgagttaaaaattgttaattggaatggctattcatgaggacatttagctgtattagatacatatatatatatatagagagagagagagagagagagataacaatgataacttttttctttcaaaaagtatattaccttgacagatggcagctcatgactagagttcagaataactttattttcctttgaagatcttctagttgatatgttgggggttcttgccagctacagcatcactgtcaaggagttgaagcttttgttcagcatgcttcgaggagaaagtggaatctgggtaagctgtggtcggagggaaaggtattcagtatcagtccattaatacttaatgttcaaaagtttgtctctagagagctatatacttgaatttataatggaaattgctttcttcttaaatgatttagtaaatgttttgtaaatgatttaaaattaatttttctctctagttagaaaacagtccaatgggtaacatggtatattaagtatgattgctaaatttgtacaatgacatttctttcttttattgtttccccagccaagacatgcagtaaaattattatcagttcttaatcagatgccacagagacacggtcctgatacttttttcaatttccctggttgtagcgctgcggtaagttttaaatacatgtgctgatttttatttatttatttttaggtcacctttagtaaggtttaacttacatataataaaatttaccagtttagaaagcacaacttgatgagtttggaagtcatacaaccactactatataatgatttgaacaatttcatcactccccaaaattcccttgtgcctgttggaagatattcccctctacccatccccactccttactacttctgatttactttgtattcctatagttttgccttttctagattgtcatataaataaaatcatacagtatacagtgttttttgttttgttttgttttgttttgttttgttttgtgtttttgacggaggcttgctgtcacccaggctggagttcagtggcgtgatcttggctcactgcaacctctgcctcccgggttcaagcaattctcctgcctcagcctcccaagtagctggtattacagacacccgccaccatgcccagctaatttttgtatttttagtagagacaggtttcaccatgttggccaggctgctctcaaactcctaacctcctgtttgcccgcctaggcctcccaaagtgctggggttacaggtgtgagccactgcacccggcctggtatatagtcttttgtgtcaggcttctttcacttcccgtgatgcttttgagatttttccatgttgtagttttaattactgttttattctgttctctctttttttgagtagtatggcattttatggatataccacagtttatctatcctatccattcactagttgatggacttctgggtttctagtttttggctgttataaataaaattgctgtgaacatttgagcacaggtctttctatggacatatgttttcttatctttcgattaaatacctgagtgagattgctggattttatggtaactgcctgtttactttcatgagaaactgtctactcgttttctgtattagaacattgtacattcctataagcagtgtatgagagtcccacttgatctgcatcctgaacattttcagtcttttaaatttgaggcatttaaatggttatgtacagtagtcccgccttatccatggggtatatatgttctaagactgtctcagtggatacctgaaactgcggatggtactgaaccatctatataatacatactatggttttttcctctacatacatacctgtgataaggtttaaattactaactgcacacagtaagagattaacaacaataataaaatataacaattatagcaatatattatagtaaaacttttgtgagtgttgtgtctccctgcctcccctccttctttgtctctctctcaaaatatcttaatgtactgtactcacctgtttttggactgtggttgaccatgggtaactgaaactatgaaaccacagataagaggggatctactgtagtggtacctcatcatagttttaattttgcattttattcatgactgatgatgatgagcattttttcatgtgtttattggccattcttatgtcttcatttgtgatgtttctgttcacatcttccgttcatttaaaaaattcggttgtttttcttattatcgtaagagttcattatatatttggaatgtaagttcatctattagatcaaggtaaaatattccctgttttaaaaagtcaataaaagttatatattatttgataataaaatgttatttatattgtatgataataaaactgcctgaactaattgcttaaatactaaaatccgaaaggttagtatagggtttaactcttcatttgaaattgtgtgtgtgtgtgtgtgtgtgtgtgtattttttttaacagcaagcacttagaaatctttgactactttgagattatttattagccacctgcatcttcagtcattatgcttggagtagattacattccttactcttgaagaactctgatggctagatatgcaaatacagcttgctacaataagagttataaatgatactgtagatttaggtatgggaacaaaactatgggaacacaattgaaaagagaaaccatgctaggttgaagtccagaaaagcttcacagatgaggaaacatattagtctgctattaaagaataaatgagattttgttagaaggaagaatgatttggatagaagcaacatgatgtataggaagaggaactgtaaaagaactagtggaatagctggtatatttagatgtactttggaatgtggggttgggtagtagaggaggataaaatcagaagggtttgttggagccatagcacgtgggaagtcctgtataacatgaagaaatttaaattttattctgaatgcagaagatttttgacatggaaggtccgtgttgtatttgagaaaggccattatcagcaacatgaaagatctatttgaggatatcttttatgtagaattttgataaagtctaggaaaataaataaatacattcacacatttcttgaagtcaggtgaaataatcagctactttcttatttattccttagaatggctacattttatttgattgctattttcaagggagtcctatattactccttttctgcttatgaatggatctgaatcctttttggttataaatatcagtagttaagtttctgagtaataaatgtcatactttgcctttcttagtttcaatgttgttagcattatgaacattatctcttaatgcttgcatttcttcaatattgattccattaacattttctagctcagtcatttttggctttaaatattcaatctcctttaaccaaatgggttactactgaaaacctagtgtaaaccacagaaaactgaaattgggaggcttatgtgtaagagactgtatactgatgaaactagatggcgacttcttggagtatagtctgaaacccgctatgtaatctagagataaaatctaattcactgagcatttgaaaattgaatgtttctataatcaacaaatactatttaggtgtactgagattgttttaataaaatactagctcttattttatggatttgtttgtgattttctggtatttatactttgattgttatttaatctgcaaaagccatatttgaccttagctactatcacatttctttaactgatactttcgtaccttttctcattgccttgtaggcaattgccttgcctcctattgcaaagtggccttatcagaatggcttcaccttaaacacttggtttcgtatggatccattaaataatattaatgttgataaggataaaccttatctttattggtaagtaatatgtttaattttagtacttttttctttaagtacttgaattctataaatgtatagtctcaaggcaacttagatagaatatatgtatatatgtgcgtataatatatgctagaactgtgaagacactgtaaatcagttttatttatgtatgtatatatgcatttattttgctattgattctaggtcatctgcttcatgattatcattcttttccaattacagtttaaaagtcaaaggtacagactttctgtcccagtctccttcaatgtatatcagttgtgggatttttagtgaggattgctggtccctgaaaaaaattccaaacttttaccagatttcattcatttttgccttttcacttactttgttctatgagcataactgacatatgctttaaaattgttgataataactatgtaagaaattataagataagattatttggtgtagacaactagaatgagttgatcaacctaacaatgtgttgatctgtaagggttgaaagcttgataattttagtatgccagtaatacacagtacagcatacttaacaataagtacatcaaacattcattgattgccatactgtatgctaggcattgtaagtgtttatatatatgatttcatttaatacttgcaatactctgtaataagacggcctgtgttcaagttctggctttaccacctactattcaccttgtacttttggtgtcttcaactataccaatgaggatagtaatagtgtctatcccataggatttaatgagagaatcatatttaaagctctttgtataatggctgggtcagaaatgtgaacacagaaatatgtgagctattactatcttctaagctctattataaaatatatatggataaaatgagaccaagttttaaataagcatctgaacttccaaacataaatggggttggacttcaaagtggtcattttgggagatcatacattaatttcagtggtatctgcatttttcagtgattaaacatttttctacatcgtgataaatttacagctaagggaaatgctcttgtagaagaaaacaactatatttcatagttacatctttttaattttttaaactaaaaatgtactgctttgcttgatcaactgtatcatttatcaaacttgactctgaccaagtttttttttctttttctttttaatttctaagctattttcaaaggtataccagaattagagagcaggttgttatttaaaatgtgaactttgtgtaaatgtgttctgtatttgctgattgcaaatggtccttaaagtctacttggtggtaggcttttgttggcaattaatttgtttttaagtatttctgagattttagattgaaatactaaaagctgtcatagtcttttatttcctagtttaaatttcttatatttacttataactaaccttttatatttttgtttagtttttatttgacacatattaaactgcttctactgtacagggaaataagttttatttttataagaatgtttaatagccattaggtgtttagttctttttatcagaggatattatactattctcagttgtctttgcagttttcgtactagcaaaggagttggttactctgctcattttgttggcaactgtttaatagtcacatcattgaagtccaaaggaaaaggttttcagcattgtgtgaaatatgattttcaaccacgcaaggtaggtaaaagtaaatatttttataactcacctgttatgacagaattcttaactctccttttatgagctctgtagtattctctttcacgggttttcctatgcttttaattgttttctcttatccttgtctgcatttcctttttacttttatgtctaatttttgtcttctgtaagatcagtgttttgatatcttgtggtgtatttctcttacactctctcattatctcagtctgatctgttttatggcattctttcaatagatacttattatctactgagtattggataccattgtaggcactagggattaataaatatttgcctttttttaaaaaagttaaatgttaaacccccagattaagcaatgcacagacacattttttttgtgggagattaacctaatcctagtagttctgaatattgtttcctgagattgaaggttttgttaatttgtgatgctttaataatgctggcttcaaggagaggaatgttgctgtactgttagttttggctcatgaaatgtatctttacttaatatctcaaataatagcagagacaaggccaaaacacattttaaaaactgctctaaagagaaaatgcagagaactgtgcaactgtatgattagaattataagagataattcattcataatcaggtggcattttctagagggattttcctgcctgagtaccagactccatctttgtgtcagaataacaaaccatctgaaaatccagatgaaagaaaaccaggacagagtgcataggggtacccgtcacacatgtttaaggctttgttccccttccaggttcagggttctttcttgggtatatgacagtgagattatcaacgttttttagggcacactgcctcctcctaacagaaatattgccttaccctttgtgattaatggtacaatcataacagatatgatgaacccaaatgtggtgagggggagatctttatttctttttcgtatcttttttgtttgttgttgcttatgatctgatgtgtgtcttcccatatacggaaaaatatattattttgggtggtatttccaaaatttgtttagattttacatgattctaataaaaatatttgctttatatttaatgtcagttattgtcatttctgttaaagaatatcaatttaacagtaattcattaacatatacttagaaaatgatttaaaaagcaatgattctgaataaatatattcattcattataatggtgtattctttcttttttaatacaaattgattattttaataccaatcacattgcctttgctctggaaattctgttttattagaattaaggtgagaccaagatagtttgctaaaagtgccaaattattttgaatttcagtggaatagattagaagtacagttgttggtattataatttttcatgttaggattgtgtgtttttaacaaatattctaggtaacttttctcttcagacaattttaggaaatggtggtttaaagaatgtacaggcaaacaattagagtgaagttataaccaaatgaaattgtcattaaccaataaaaagcactttaacccatttgttctcactttttctattttgtgtcttcttcactgttcacttttggaaaacacattctcctttgtaaagctctcaatatgcagtgaatctaaggggtctagttaggagcagggccagagagtgatgtggattttaaaaagtcttttgtgaagattctcacaaaccttgaaaagtcataaatatttgcttttactgtgtttcattattcaaaataaattcattctcttgtttattcctctctttaattttccatagattccctagctaagttgttgttatccttcctaataagagatttactggcctttcaaaaagaaatctttacattaaagcttttgctttcccagctgtaccacttaaccagctgttagaacttgtgaaaatggatataaaccattagcatgttacctaatggtaatatgtgctctagacatattagctactattgatatcatgctgtacttttaattttcaatttattttcatatcttcaatttataatacatatcttgtggattcttaatatggatctttttattccttattactggttgtgtctttcttttataaatttctttttgagtctcaaactaaatgcagacttcagtatatatacataatatcactatgcacacatagtttccaagtttatttttattttctttagtcaaagtatatcagatcaaaagttaggcttttttttttaaccattgaaaaactcatttgtgtctgttatctgtagagtacagtttggtgtaccaaggaaagagaaaagttacttttcttgtaaataagtactatggtctttactgagatcagctcattaatcagtgcatttgtttattcattcatttaattttatcatatattattgttacaaccaaaagcaaaccttgataaactccaaatctgattaatttttctgtattaattatcttaagttaatggtacccttacccatctaagtgaaaattggaagccatcttagactcccatcttagactccccttttatatgttaacacttcctatcagttctgttagttaattcccatcctcattttaaaattatgagtgcctttgtcttagttccgcagcttatggtgtcttacctaaatctttgcagtggcttttcaattttatctttatccacacttgcctgcctatctcacctccacattgctgccagttattttctttaactatggagcagatcgtttcactttcctgctcagaattatttagttataccacattatgcaaaaaacaaaggcctaaaggtctgtttacaatctggtctttgcctgtttttgtttttgtgtttttcctgctaaacctacacactgaggaaagttttgtcaagcatctgtgctgtattgtattaagattctgcctggaatgtttttttaaccactgtctactgaacagttccttttcatccttcaagcttagtcttacagttcattttattcttttagtgaatatttctatgatagtctttcttctctatttgtctttccttcccagttacttatagtatttacttttattactcccaaatctgtattttagatactctctattctcataactgtttctctagtgaaacttccttgagtgtgtatatgttgtccgtctttatatacccatgatccaaggttgggatagggtacttggcataaagtaggctcagtacattttttgaatgaatgaatgcctttgaaaggtaaataataatcaattttagcataaacaaacctcatcatgggacatagtagataaaaacaaaatagcagtttagtcaatggtatgttatgtatgggtgccaaatacattaggaacttttcctcatagttttcatacattatctatttataatattcacaaggaatccacaaagtaggcattattattcccctttttcagagatgaaaataggttcagagatactaagtaatttgccaaaagccatagagctagtaacttgggaatccaattcatgtctttatgaagtaaaattcttcctgcccagtacattatctggagtagtaagaactcagtaagtattgtttgaatgagtactttttttaatagtaagtacaccaataagtataataatacatctagtatttatcttaaaactgtctttgggcaggaaatcttttcctatatgtaggcatttattcgtgtctcttctctttagaaatgcaaagtttacacattttattccacaatataaagtttgtgtcttctgtgttatttagatagcattctgattgaatattttcaaattcagtgaaggtaatatatgcaaactttaattcttatacttgtaaaattctataagattttccttaaatttatttgacactctttttacggttttttcttgataattttgtaatatttagaaacaattgttaaatgaatactttaaagattttctcttctgattttaatcagggctaacatatatgttggtttcaaatcaagtgaaagacttagtttccaataaattaatgattacctggaatgaaaaaacttaaaaaaggatgtgcattttagacagttaaatgtcttgacctgaccttgcttttatagaagcacactgttgttttgtattactgacttttttgagttaatacactgttttttttttctttttctgttttcttttcttttttttttttttttttgagacaaagtcttgccctgtcgcccaggctggagtgcagtggtgtgatcttggctcactgcaacctctgcctcccaggttcaagtgattcttgtgcctcagcctccctggtagctgggattacaggcacatgccaccaggcctggctaatttttgtatttttagtagacacggggtttcaccatgttggccagcctggtctcgaacttctgacgtcagttgatctgcccaccttggcctcccaaagtgctgggattacaggtatgagccaccgtgcccagcctatttttattttctaagttgaaatgaacaaaattgaattttgctcaaagtattttagataccttgaaataactaatattttagtgattaaggattattgtaactttttatttctgaaaatatatatgaaataattgaatagtgcatttaaataatctgtagaacaaagtttgtattttatattttggtgggagggagaaaccagttaattttccccccttaacttcagaaagcatacttgttcaaatgtttacaaatcatttgtatttttctatactttagaaaaaattatttctatattctcgattttaggctattaactctcaggagactaaaggttgctacagaaatcaaaccatccatattaaaatagatacttaaaatgctttttgataccagtaactataaaatgggcacttaatatgaactctttcatttattcttaataaatattcccacattgttattaaatatataattatcctggatttactaaatctaaatggtgaaattgaagctacctaaatcttattataaatgctaaaatgttgtttctttgacagatccttcctgaccatgcaatccaaagtagaatccttgtttattctttttcagtttatactgttctttttctcttcactgtaatcaccatgatttataattctacatttgtttaattgtgtcatatatatttcttttactagctcataaattctaggagaactggtcagccttgggtatctgcagtgcttggcacaatgtaaattttaaatgaatgaacacaaataaattgtatttctacaatttcgaatcttggtatagtggaaggaacgtcacgctggaggtcaaggggttgtagttcttgtcttctccaggagtattctttatgtgccacttctaccatctgtgaaatgagaaatgagagggggaacttgatcaagtggtattagatgatccttaatagtcctgtcagcatattcttgtagggttttatgaatgttacaattgcattttagactgtaacaaccaaacattacatattgatatatttaatttttttatttaagtggtacatgatcagcattgtccacatttacaatcgatggaggaacagtgaaattcggtgttatgttaatggacaactggtatcttatggtgatatggcttggcatgttaacacaaatgatgtaagtctttatttttctgtctgtgttttaatttgtttgggagtatgatctatcattacaatatgaattaaataataaaatagtttggtagaagcttaaaactttgaaagtttattctttttattaaataaatctttcattgttaaatttagtataagaaaatttctaaaagacatgattagtgattaaaaaaacagaaacatttagccaaagttttaagttttttagatcaaaaaccatgaatcctgtattctgtttttttccagcatcaagcactaaaaaatgtggtttaccccttatttagatatggaaagaagaccctaaacagaagtataacagatagtcactattattaattacatagtgataaatgctatggagaaaataaattggggatacaggaagtaggtgtagggaagggagaagcaagatggtccagagatgattttagtaggaagagttgagcaagcaagatatgtggggaacttcttctattcagtgggaacagtgagtgcaaaggctttgaggcagaataggaaagttcaaggaaaaggcaatttgtctggagcagagggaggaagaggcaaaataatattaagagatgaggttaggcagaaatcattttggccttcataagcaaacaaggcctgggttttcgcatcttactcagcttaaaaatccttggaaggttttcagcagacaagtgatgtgtgcttctattttaaaaccatcagtctgcctgcagtattgagaatattttgaagggaaattacagaagcgggaagatcacttaaatcgcttattataataaaacaaagagactttattagtgtctaccagtatattagcaggggaagaattgacacagttggattctaggtagagaataactagaatcaaaacctcaagggtccttacggtttctctactttgggctttccattgtctacattccggcctgtcagagccaaagtgaaaggtttgttttaatgctgaaagtacctccaagctcaataatatacaacccttcaagcatacctggttttataagaacttacctcttaaacacaattcatttctcagttttgtttgcatctctctaggctttcatctcccgaagggcagggatttgcttatcctgtcttgtattcttttaactagcactgtgcatatggtccacagtttgtcccctagattggggctgggcagactacaccctatgagccaaatctgaccctccccctgtttctggttttgtgtaagctgggggctaagaatcttggcttttaatttttaaaggtttttgtttttttgttttttaagagacgcaaacaaaatcaaagaagaatgggacagaaaccaggtgtggcaggcaaagtttaaaatatcttctgtctgtccctttatagaaaacgttacttttctctgccgtagaaacttatggttgagccacaaccaataaatatttaatagaatgttgttttcagaattagaatacacagatgaaattctgctttttatcttctctccagaggagatctctccagagtctttttattatagagtggaggaaatcccagtggtcttcttgactcattaaatgagaagacagtatcttggaaagaaaagacttagttttttggttatttgtaatagtgccctaagaagtggagaattctagattataacacatatatacattctttatgcagttaaagttcccatacttctaattaaagattgtgtatttaatgacgacaattttttttgcctttgttctccattcacaattttttttgttactttattgcagtacgaaaagtacttcttacatatataatttttgcttattcgttctaaggtgtgaaatagcctgtggggataggagaaaggaactgagccatgactgccttccctggtttgggtgggcggggtgtaagaagtagaggctggaaagatcaagcttttggcttcttcagtgctgaattcctcttgtggagagcactgtaccatcggctttaagcagcagatcttagtcttattgtttatttgattctgtgtaattcctactcatatatgagaagcgattgattttctttgtgtcttttacttaatatggagaagtagaggaatagatttgtaatttgaaaaataaagtagaataaaaaaattagaccctatgtgttcatgattaaattttggaatagtcattcccttgattcagatcaatctctccatatatggatcattatacatcattacagttttaaattagtttaacttttgtaaataaataattataagctattttgcctttaactatagtatttgaaaagtggtaagtctgaagattaagtaggtggctattgtttgtttgcttaaacataagtgtgaaacatgtaactgatcatttttcccaaaaaacttgactggcatttattattaaaataataaagtcttaattgatgctttcttctattattattgttatattttaaaatattcatgataatgaaggccgatttaaggatttaaacctttttgtcattaaaaataatgcatttttctttattacttttaaaaatagagctatgacaagtgctttcttggatcatcagaaactgctgatgcaaatagggtattctgtggtcaacttggtgccgtgtatgtgttcagtgaagcactcaacccagcacagatatttgcaattcatcagttaggacctggatataaggtagtaataactgtaattttataaattctatggagagttttagatgtaaaatgtggtgtaatatcatttttagtgaaaatctttaatacggtttaagagtcatttctattttttggaatgtagtcaagttttattatatgtttctttttggttcaaagatgcttcttaaccattttataaacttttattcttcagaatattttctaatattcatggcatgccttttgttaacaattctgaaataatagatcttataaaactgttttgcttaatgtagtatttaaaatacaaaaatttgaaatatacatattacttaatgaacataataaagaacttgttaatattactggtaacttggaaagaagagttaaagatttagaaggaaactaagataatatatttcatgggcctaaaattattcaattttagcttatagttttgctttaattgcactaagtgaggaagtaggtacagtagtgagtatactaatttagcaaaactaattaatgtaatttatcatattctttttgttttttaaactttaaaaacaaagactctaggtaagatagagcgtgcacatatatgagttagttttaagtgtgtagtacatctggctaggggagtatataagggttctatttaaatcacattgggaattgtaaagtctcaaactacttcgagctgaaagagaattacacattatagtcaaagtgtttataattctgaaggagtacttgtcttgtatggaagtgtggttttttattgaactcaatttaaataattaatgtgaagattgtgtaatggaaaggagtagtaaatattaaaaaatattccctctttggcctttgtatttttgcattggtatttctctttgtatgtcatatatatatatatatacagagagagagagagagagagaggaaagtttgaatttacccatattaaaagatctttttgttctcagtgactttaataaccataataatactgaagaagaataatgctattatttttatgtcaaggtaacaatacttgctatcatgtattttccatatcatttttggttttgtcttactagctctagaaatgaacttgtgcttgtacagttactttttctttcatgggtctttttgttgggtttgcatcctggttctgccattgttgatcttgcataggaatatttttgtaattcacattttgtattaatatgctgcatgcttttctttcctagttctttgagttttttcataaaatacttgcagtgtctttttaagctctaatagaatgatattaaatagagtgacaagcaaacaaatgaaatataagaaggtagaatatcaagaaaatacaaatccaatatgattgctaatgttaaattttagaattgatgggagcttcctggcaacatcaaggaaaagggctgaatataagcaattttgtaattcttctattcacaaagaaacaaactttgtcctgaacagctttgcaaactctgtaatttgtagtattcttttcacacgtctttcttgtcattctttttaacagcagtgataatgagcagtaaccctgtcatcatgtgtacacagctcatgtgacatagtgtatccttagtatcctaacacacagtagagtacctaaagtcagaacttttaagagatatacttgtaaatttgggcattacatcagagagtattttattaagttttgaaagttctcagctcactgcaccccttgttgttagcttgggttgatgataaatccacgggtaaatgcattttctcaatttgtaaatattataaatacagttgctaccatgacaggcatcagcaaaaattttttatattaaaaagctttttttttcagaaattcagagaatatagggaaggaggaatgcatttgatcagattgtgttttgacagaagaaaacctgagtagttcacacattatagtcacaattatcttggtaaagtcactttctgtgagtgaaggggtagagggctacagtggaatttttaaggtgtagagaatataataactagtggacatttggataaatcacaaatggagtttaaattacttagtgttgtataataacatagtatttatatttttttgccttaagttatatggaactttctttcattgtaatggtcagacaatatttatgattctgagcttagtgtagatagcatgtcaacatacgggcttcgaaattaataaaataagttaattctaccttcaaataatgtcatcaaactgtatattcaatggagcctatcacaaatgattttgacttgctggtcactggagtgctaggtaatttttgttctgtcgaatttttggttttgagcgttgcagtttatcagtaaatattctgtacttggttattttctggaaacagtaaataagttagggtgtcacttattaactaaatcattcagtttggaaaataaaatacagaaattcagaaaatatttaaaatactgaaaatctcactgtagatttgtctagtatggtaaaatttactatcagataagtttactgtggatctctatttggggttatttaatgtcttcaagattataaaatcttgtgtatcaggtggccctttgacataagcttgcaaatcagattttaacaaagtttttatattttatagttattactagatattttctcagtgttatgttaaccctgtgtggcaagcagttagtcttcattgccagatatttgaaaatttagctttgagttctctccttcatttatgaatatgataacaatggttttatgaattgctatatcataataaagttctaactgataagagaaaaagtataacacaacctccaaattaaaattcacttcagaggatttccaatacttgtatggaggggtgagctcctaacaaactgatcttctcacaaataaccatttgtaaactctgcatataatatagataacatctatagggttatggagattgaataaaagcaggcaggctttggagggtagtcaaaatatggaacagtcagtctgcatggactgatatccttattttttgcttttataggagactttctggccagaaagtttctctacaatattgtacggagtagtagtcacacaatttagcatataatcccaaagtattttttctaaaaataggaaaatgtgacttattctcaagggaagagaaaatcatcatataccaacaccaagataactcacatgttggaaatatcacatgaggtctattataactagtgaggtagagaaaaatttacttataatgaattaaaagacaggaagtatcagccatgaaataaaacaaagtcagatggcaattctagaactgaaaaatatatcggaattaaaaataagctgtatgggcttattagcagaattaatatgatagagaagtaaatgaacttgaatatagattgatagaaactttgaagagagttgtgaaagattggggtaaaaaaatagaaccctagagatggatggggcaattttgaaaggtctaataggcacagtataagagaaagccagaaaaaatatttgaataaatgatgttagaaaacttctcagatttggtaaaaggcttacatttatagattgaagaaactccgaaaactccaaccaaaataaatgcaaagagaaccaaagtaggcacattacagtcaaagtgtggaaaaccaaaaataaagagaaaatcttgaaatcaggcagaggaaaactagacattgataagggaacaataatttgaatatctgtacacatctcatcagaaagcagtaaagccatagaggtggaacaaaatccttaaagttctgaaaggaagaaaaaaaatctgtcaacctagaatttttttatccggtgaaaatattctttaagtcttttgaaagaaaattaaataaatttgttgttatttgactgtcattactgactgaaaaagaaaacctggatgattaggagtatatacatgtaatacatatgacaactaacagaaagatttgtggagaggctataaatgcacctacgtagttgaaaagttgctgtattttacaatgcatcttgatagagtgatgttgactacaattcaatggctaaaacaaaattaacaaagtcaaaattgcatgtcttttcttgaatgataggccaaatatgtatccagtatttcatttacccacagcatatgttgtagactcctctttcaaatgaaaggtaacaaaagctcagttgaaaggaaaaacaaaataaatcagtgctagctactacagataaggtacactaaatacaaataattagccttcactaattcatccattcattcttttattaagcagttgggcactgttctagatgctagggatataacaattaaaaccaacaaaacccctgcctgtattttggagaagtagggtgtgcagtatcatgggagaagatagattacaaaacaaaagaaaaatatatagtgtctatatggtgataagagctatgagacacacaaagcaggtaaaaaagttggaagttgatgctagccaagtggatatacggggaagagctttaagggcaaatgccagagccagaataaaggccattagcagaagcttacttcacagattaaagaacattgtgactgttttcctgtgactgttacagaaggagcaaggggaagagtcaaggaagattaattcagagaacaattacatgctttcagaggattgttatgactttatttttgctcttgagtgagaggaacagccattgaaaagttttcagcctgataccaatttgaaaaggatcactctggttactttggtaaatagggagaaaaggtggaaatagggagactagttagggggctgttgcagttatttagtgaaagagctctggaaagtattgagactcgattagatttttgataaagcatatctaaaatatctaagactctaaaaggtcagcttttggatatactttggaggtagtgccagtaggattttctgtcactgtgaacatggggtaagggagcaagagaggattgagaggagcaagtaagtgaccccatgaattttaggctgaaaaactgagctgatggagttgtcatttactgagatggggaggactataaagaaataagttttggcagagaagatcaaatatttggttatggacataggttatggacatagttgtttgagatgcctgatagacatctaaatgtaaaaatgaagaacgtctggagttcagaggcgacatacaggttggagatagaaatttggcattggcaggatatggacaggatttaaaggtaaaggactggatttaggtaccagtgaagtgagttcagagaaaaagataactgagaaatgagtccttgggaaagccagtgtttgtaagttgaggagatgcagaggaaccagcaaaggagaatgaggagaacaagggaataaggagaaaaagcaggagagtgtggtgttttaacttgacctacttgaagttaaatctcctttcttcttcattgaggatactgattgtcaaatagacacaggataatagattagaaaatcctgtaattatacataaagaacagtctcagaataacaatatcaataatgcccaattgttataattactgaaaatacagttaatttgtttttgcatatgttatcttcattctccatcttgccatttttaaaatagttgaggtatgttacaaggtgaattatgttcccctaaaattcactaaaattctaaccctcagtagcccgtaatctgactgtttttggagacagggtctttaaagaggtaattaaggttaagtgaggtcatttggttattgggccctaatccaatgtgactagtatccttataaaggggaggaaattaggacacagccacacgcaaagggaagaccatgtgaagacacaggaaagaaaaggtggttagactgtcttcaaaccaaggagagagtctccagaagaaaaccctgctgacacccatatgtcagatttacagcctccagaactatgagaaattaaacttcttttatttaagccatccagcctctgattctttttcatagcagacccagcaagctaatacaaggtcttatctgtgttgtgagcgcacacagtcactacataccattgactcttaactcttacttaatcatagttctataagtacctgtgtgtttaaggcttatattatttccttatattgatgtgtttcggctgtgttttagctctttctgtagtagattcctcaggaagagttcatggaaatagtatttcttgagaaatgcattttgatactagtttgtaaggggctttatactttatacttgaaagccattttgcctggctataaaatccctgacttttctttctttggatgtcttaaatatgctactaatttttctctggcatgaggtattggtattgaaagcctgttgacaatgtagtatcttctccattacaaggcacttagtcttgttagatgttcaaaggattttttttttctttttccttatatctagtaattttggtagatatgtattggtgttggtcactgtgagttaatttctcaggtatgtggtgtccactttcatatgtagtttgcatcttttcatattttaagaaattgttcttgtactatacttttagaatttcttctatttccttgctttggttttcttctccagacacttgactatgcatgtttatttactttgcttatctttaatatttctcttaaatcactcctcatatttcactttctcttaaatctttatctccttctttatttctctctcattttaaaatttaaaagtaaaataaaaattacaggaaagctacaagcactatcccagtcagtttttttcctgaaccctgagagtaactactgacatgatggttatttaggaatgtgtttatttccacatatttgtgaattcatcaaattcctttatattattgatttctaacatcccagtttggacagataatatactttgtattatatctgtcttcataaatttattcaggtttgttttatgacctgagtttggtctattcagggaatgtttcgtgtgtacattttttttttggaaacagggtctctccttctgtcacctaagctggagtgcagtggtgcagtcctagcacactggagccttagactcctgggctcaggctatcctcctgcctcagctcctgggtagctgggactataggcacaagccactgtgcctgactaatttttcagttttttatggagacagggtcttgctctgttgctcaagctagttttgaactcctggcctcaagtgatcctcctacctcagcctcccaaagtgttgtgattacaggcatgagccactgagcccagctatgtgtactttagaagaatgtgtattaagctgttttaggatggtgtgttctagagatgtctgttagttctgtttggtttttgttcaaatcttcagtttccttcttgatcttatgaatggaaagttgagtattgaagtgcccaactattattattaagttgtgtgtttctcccttcatttcttcagagatttcttcatgtattttgatgctttgttgttgggtgcacatatgtttacaattgctatatcctcctgataattggcccttttatcattatccaatgtctttttaatatctagtaatatatcttgttttaaagtctattttgtccgatattagcacagccattccagctttcttgtggtttcttgattttttcccattttatttactttaaatatgtttttatctttgaatattctataaacagtatgttattgaatcttattttattatccagtctgacaatctctgccttttgatttgattggttatttcattcatctttaatgtgattatcgataattaggtttccatctgtcattttattttttgttagctatgtgtctcatgttctttttatttctttatttcttctttactgctttctttggattatgtgcttattttcttatatagcattttcaatttttaaataatttttttcacttaaaaaacatttctttagtgattgcagtagagcttaccatatacatcttaactcactggaatcagccccagatttatattaattttatcctagtgagttatataaatgttacttctatagagctctatttgttttctctgtttttgtgatattattgttatacatatagtatctgtatatgttacgaacccaacatgacgtaattattacttcatataattgtgtcttttaaagaagctgagagaagaaagatacagtatatgtttatagattttgttatattgatcttctgatttatcatttatgaatctcttcatttgtttctgtggattcagttaccacttggagtcgtttccttagctcagtacaactttgcttccatctaccttctttgttatgctgaagtggtccatactgaaaagaatgcatcatactctacttatttgagtgtaattagtacaaaatatattcataccttcttttcttcttttaaaataattataacagttttattgaagtgtaatttacatgccatacaaatcattaatgttaagtgtacaagtcaattatttttttataaacttacaaagttgtgcggacatcactacaatttaattttagaacatttctatcaccccagaaggatcctacctgcctatttgcagtcactcctcattctcatccatctcctcctagtcatacagatttatataataattcttcctctgaaaatccttctgaaagaaataatacggtaaacattgatatttatataaaggcttatacttttatgtaaaatattttctttaaaaaaaattttttaagactcaaggtctcactctgtcacccagggtggagtgcagtggcatgatcatggctcattgtggtctcaaaatcctggacttggtgatccttccacctcagcctcatgaagagctggaactacaggcgtgtgacaccacacttggctaatttttaattttttggtagagatggggtctctctgtgtgttgtccaggctgatctcaaactccgggcctcaagtgatcctcccaccttggcctctcaaagtgctaagattacaggtgtaagcatagtacatgtccgcctttatatataaatttaaagacatagaaataacctaatactgcaagtaaggaaagataagaaaattttcttcatttaatggattctatgtttatattgaaattacattatacactttttttaaacctaaaacttgtagatttattacataaacttgttttcctcctacaaaccaaaatagcgtatggtatgtatcatggactcagaaaaactaagaccaatcaatgtttttccaaataaaaataggttttattagatatcttacatttccacaaaatgattttaaatcttttaagagaatatattaaaatttgttaattccagtgtaagcagtatgaacaaaatgaaagcaagagttttgttctagacaatgggatgtacaaatgtttcagcagtggtaaattgcagacacggaaagctgatttcagtgtttaacaacttatctgtgtgttttaattcagtcactgtttttttgaatgcaggtatgctgagttcttaagcattctagtgataacactaccctcctcattcaaaaaaaagtattatcaatgacatacttcagactacagcatacacaaatttttaatcgttcatgttgctcttgtcttggcacatgcctgataactaatggtttgcatccagttttcttttagatagtctctacacgctagtccagaagtaaaaactgacatgtttggtctgcacagtgttaaaatgtttgaattaaattttaaaatatagtgattttagataaaaattcagatttcatgtttctcttgaaaaatatggaagaactagcaacattgaacagttgacttgagctgaggagtgggggccacttttagaaaggacaaatcttctctagtttgaggaagtccccatctggcccaattcacttatatgcatatctgtatgcctcccgtaagaacttgagtttgggacatttaatttaaccttataacattagagtaagaaaattagagccacatcagcctaatgatttgctcagcatgaaaaagataattagtggcagagtcaggattttaagatgatttcactatcgaaacattgaatatggagtataaatcagaagacttagaattacgtgctggccccttctacatcttaatttctgtaacattcagttttcatagttgtaagttgaaattaatagtaatactgatatgtgattattgcaaaggttaaatattatttatcattattagattcatatctgcagagcaattttaaccacatctaacaatacctttcttgttatagatggcataggtttagttcttgtgtttcataaaaagtaataacatgttttaatgaacttctcttctgagttttgtatgtatattgtgatattattattgagtagcattggtatttcataggttgatttgctttttagtaaagatgtgaatatttttacatgttaactttttatagcctcaaatgatagtcatttttctctataagtaattcatgtgccaggcactgtttatttacacaaatactttttaaagtgttaacaagaaaaattcaacttaagctctgatgtagtcaagtaacatcctatttatatataatatcaggtttgatattttttctaatgaaatgattttgccagtaatcaaaaactttaaattagaaaatgaagatctgagcatttttattggcataataaaacttaactctcattgaattgaagtgacaataacaaagtaagtaataccactgaatagtccctgacacatgaaaggtacacaagtagtttattattgtaaatgtttctctgctttaaaacttttgagtgtaattgttgcttttaaaaagagtgtttaccttagttttattttttcagagtaccttcaagtttaaatctgagagtgatattcatttggcagaacatcataaacaggtgttatatgatgggaaacttgcaagtagcattgcctttacatataatgctaaggccactgatgctcagctctgcctggaatcatcaccaaaagagaatgcatcaatttttgtgcattccccacatgctctaatgcttcaggtgggtgaatcgtggctttgttttcatgttcttgtcagaatttgacagtatctttattttatatatcaaacattgctcatctataaatctatgatttttttgcttcttttttggcttttgcagatcttttaagtgaaactttaaagaatatctctcttttctatagcaatatactctaccctggccttgtctccttagtaggaaatctgtcatatccattatcttatatagcctttgaaattaaatcaattaactgaataagttagttgttagatataaaaacatactttgctttaagaatgtattactaatattctctaacattaaaattacttgtctttaaatccatcaatagtatttctgattttaaaataacgtttgattttaacttaatatttttagtgtgaaaatgcctcaacctaagatttgaaatttaaaagtgattagcaaaggtattcacttttttgtcttatatgtgtataaaaattataattgaaggcttaaaaatgtccaagtatgttatttaattctattataaaggtatttggaacaaggaaatagtgatgaaatcattctatagaagtttaataaacatttttgtttttggacataggatgtgaaagcgatagtaacacattcaattcatagtgcaattcattcaattggagggattcaagtgctttttccactttttgcccaattggataataggcagctcaatgacagtcaagtggaaacaactgtctggtaagttttctttgcatgtacaattgctggtattttatacacacttaagactatgcatgatgtactcagtgctgtgtaaatgtattacagtatttgggttctgcccttaaagtgtaataaaaaattttttagaactaatggagatagatatttatacaataaataaagaaaacgctgacatttaggttgttatatcataaaggaatgccttccttgataataaatagaaaattcttaccaaagatagcataatgattataatatgtagttgagggaaaaatattaatcctgaccttatcatttgcatatactcatggtttgaattgaccatgaaaccctgtcaggttgaagaaaattactagggtaaagttattcagaagaataacatttattagcaattacataatttatatcttaaagaatggtattattttataatgcttttgtcatggcataagtctagcataatattaattgacatcagcccttatttatatatagtttatatgtgaggactcaatctaaccaggcaaatccatgtttatgtaaaaattaaatctcttctaatgagtgtgatttcatgtacatttttatagtttctcttttattaaaaaaaaccttatgtgccagactctaatttaatgttatatcttagaattatacatacaagaatttaaaaatgaattgtagtagctattttgattatacacattgccatgcttggggattttaatgggcaagttatatagataagcattaatttttattccaaaagtaacatagtagtgcttcattagtgtatatatatacatatacatgagctccttaatgggttatctaattttgaattgatggcgaatctagtgaatgaagatatgagaaaaatttaaggtacaatgaaatgctttttctcataattattatctaaattagctattaatgaaattccattttagtatttctaataatattatttctgttttgggaacatctttatgtaaagtataaatctaaatatggatatgagatttgtacatttataacattcacctcccgtctatgggtcttgccttcttttatatcaatatagtgtaaaggttggagttttgaaagtaaaaagctttgaagtgaaaaggaatcctgaggttatgtcctgctgtgatactattttgcttgtgagatcttaaataatctaattggaaggcagctcagcttagtggaaaaatcaaactttaaatttcagtcctttatttaaattcaaaatgttttactatttatcatctcagtgaactaggacatattatgatcagtatttaaaatctagtcagtactgtgaaaagaagtgggagatgaagtagccactagaaaaatccatgtattaatttaaatatttcttatgaaataatatgaaatacatatattatcaaatcttactgctaaaaccatatgtaataggttatttggtttattcatccaagacacatggttactttttactgtctttcttcaaaactcatttaatatttatattatatcttggtatttaaattgtatttatttcatcgtggagataaaagatagtgtgaggagtcagcatacctattttcattttgattttagttctttaaatcatcctaatatttccctatattaactaattccaaccttttcagtgatgtctattatgtcttttgtttgtttgtttgtttgtttatttatttatttgagatggagtcttactctgttgcccaggctggagtgcagtggtgtgatctcttggctcactgcaacctctgcttcccagattcaagcaattcccttgcctaagcctcccaagcagctgggattacaggcacctgccaccatgcccagctaattttttttatttttagtagacacagggttccaccatgttggccaggctgatcttgaactcctgacctcaagtgattcacctgccttggcatcccaaagtgctgggattacaggcgagagccactatgcctggccctgtttatagtttagccaatagaaaacattacaagaatgatactgctttcctctttaatacgtactcaattccaggctaccctgtgatttagttatgtactatttttaattcttatctattactttttcattaattatttcagtatcctaaatatctgagatttgctctttggtacagacaattgtgtggatcagtaatacagtcttttgttatttaatgttttatagggaaccattatagaaaagtatgtgcatcagtgaaatagtctgtgattttgcaagctgttaagtgggatttctccctctatttgaaaaatacagattcatggctatgcaggggtgatagaattttatgttttatggctatatcatcagttcatatcgatgattgggaccttgaaataggatttatcatcttatttagttgataataaattgttctagattaaggataatcaatttgaagtttttaaatcttacagagaaaatttaatatactcctttttggaagtctgattgcatggtaaatagatgactgaaagttgcaatactgtctaatttttaattacttttttgagaaatggagctaagctcaaatataagttacttctttgccctctgtgtttcaagctgaagcattttatcttccacatagttttctctactaagtagtaccttttaatgaaacttttcattgtttcttaagccttacctctgttggcactactactttgttttatcaactttgatgagtttttactttatataggggatttagaatttttaaaaaattattggctgggggtggtggctaacgtctgtaatcccagcaccttgggaggctgagagtggtagattgcttgagtccggaatttcaagacagcctggacaacatgacaaaacctcgtttctacaaaaaaatagaagaagttagacgggcatggtggcatgcacctgtagccccagctactggggaggctgaggtaggaggatcacttgagcccaggaggtggaggttgccatcagttgtgatcacaccactgctcttcagcctgggtaacagagcaagactctgtatcaaaaaaccaccccaaattattgaaggaataatttcattttctagagtcttcaaagatggatttatttttgctggataatttttgtgactttttaaattatgaaggccacttatagttgttttatgtatggactttcaagtcagacaaacatgggttcaaatcttgaatttagtatttattactagtacaactttgtgtatgtgattaattttttgagcataactcaaactctgaagtaatatagctttcgtattttgtgtctagaatgactcaagaaattaaatagaaactttattttcctttgaattggatgattatgtagactgagtacatattcttattgagtacatgttattgagtacatacatcttattgagtacatatttttcttacattgagctatgtttttaagaacatgggtaattatgtaggtgatacaaaataaaaccttcctcattgtgtgacctaagacagttttgctttgaaaaaaaattatgttttctggaacaaggtataaattgagttttgtatatcaaacaattaaaaatacaccaggagaatagtttcattagaaaccagtgtaatatattgcgtaagtgttcttttggtggaagacaaatttgggctcaaatccctgtcctgttttatactgtccgatgttaggtgatgggatattcatgggtgtgtagtagtggtacatggcatttattgaatacatactgtgtgctagtcacttatttttaaaaaataaattttattgtgtatgtttaaggtatacaacatgatgttatgggatacatataaatagtaaaaaggttactatagtgaagcaaattaacatgtctgttgtctcacatagttacctattttttggggggagggaagtggctaaaacgtactaattatgaatcacatacaaaatataattctgttacctacagtcctcatgttgtacattagatgtactcgttcaacctacatatctggtactttatttactctaacctacatctccccacttccaagccctgtgtcccttttccctgatagccactgttttgttttttatctctgtatatttgaattttgccagtcatgtattttagtgtaattatttgctgatgaagaagagaaaaattgaataacttgttcaagatcacagagacataagtggcagaaccagggttctaatcctgcaagcctgactctagagctctgactctaaaccactgtggactactctgagaatcacttttgccagctgtggaatgattttaataagtgccaactttatctgattgtaatatgaattaaaataagacatgtaaagtatctgtcatagcgtctgtacatagcatctggcatttaatgagttttctttttactttcttccgtgagttactagtctattggttagatgcaactttttaattattaaaacttagttttaatgttattgtaaactatgatcatttttataaagtagaaatttcatgtgataatttaaataaattatcttaagtatatgaatatttttctaggaaaagcattttttaaaattacaataaatacagtttgtttgctagaaggatggaatgtaagaaataaaagtgtttagagaatcccataaagcatttatgtcaacagtcctatcatatgaacagtcctcttgtaatgtgaatatttatgactcattagtttgtttagtgaacttaaatcacaatttattttttaagattaccttgctaattaatcaaagttattccagtgattaacttgaattttacagccactttaataattaagcagccccttaataattaagtatttcattctaatattctgattagcactattgtaatacataaagcaacagaattacctggaaaatttaaatatttcagcgtctaactgccttagccagatttcctcatacacttagaagtgacatgaaaatcctttatctgaccatgtttcctgatttttaattcagaaaaaatatctattatatacagcgttaaaattttattacatactcttaatccaacttaatctgacttaaaaataatatgtgattgtttttaatagggaaaataattaaaattagtacctgtttataataattgcttatcttatggaggtggtggttcttatatatagaatataattattaatttagtttccaaaaacatttaaaatatttgtattaggctatagtttatacagttatatttacttaggtttttcggaaagaatataccactgatatgtcttaagattcatatcactttgtttgcctttaaaaaaattgctaaattggtactgaaaacattttgaagtgatagacacaaaaaaatacatttgatgtacttgcactactacttttagaagagaaaaatgaagtaatttggttagtgagatttaagcagagtaaaatgaaatatatattgaattcactatgcaaatgaatttataagtagtaaaaagtaaaatacattattctgtctgaaacatcaggaaacattacatttaattttcaaatagctttttcttctttttaaatttagcgacagccactttcaatgctatactactttgtgttgtttagttttcaacacttaatttttctctgtaaatttttctttgtcttgttacaaggtttatgcttttatctttgacccttcactccctctctcttgctgtggaaaaaaggcacctttttggcaataagattaactacaaattattccttgcagaaattctggcgaccatggacacatcttcactaaatttgttgccttaattttcttctagtttgcatttccacattctgttgtctttaatttttcagtcttactatcttctaacaggagtattgttattttactcatgccatagatttcatttcttttaactgtcttacattaccttccttcatttattttgattttatgacagtcgtgcaggtataatggcatcagcccaaaactaaaataaatattatttgcctttataaagagtattaccacatgccataattcatcctcagaaacccagaatacttttaatagattgtagctataatactgattgtcacaagtgtttaaaccctcttctttttccatccaggggtgagatgtgatgaccataacatgtaatgaatggaattttcaagaaaagatttagtaaagcatactaaggagattctagctaacttagtattataattttattggtttttgtttctaattctactcagatttttaggtccacaatcttgttacctaggctggtaacttccagtgcttatctctagcttgccttcaatttaggcttatacacataaaccattgatggaatatttccatgtggaaagtatctcaaacttaacatgactcaaataaaaattcataaacttctcatctacccaatttctattgcttttgattttctaatgttactgaggaacattgtctccaggcagtctcttaaattagaaccccaagagaactcatcagttactttcctccctttgaataattaaaatattagctgttcctgtatttcccacatacaatctatcatgataaactattgatattattccttaaatacctcacaaagctaccctttcccctccatccatattgctactgccttagtctaggttcccattattaattacttcagctagtatatatccagtaattgctgttgcccttttccagtaattttcaatgggtagaagagttatctttctaaaatacaaatctaattatttcacaccagtggtcattcactggtttcctgttgcctcagaacaaagtcattatctgatttggtcatgcttacttatcttctctagtcacatttcttgatagtctttccaaacccaaattcctatatatagcaataaggacaaagggtggaaaatgctagcagggacattctagaacatgtatttatgaataaaaggtgctacaaatagggacggcctcagcaacagtgtatagttgggaacatggtttttctgcagtccttggatttataatgtcagtgaattagggaggagatttaacagaatacttcatttaaggtgtcttggagtcttactacctgctttataaataaaggggaaggtttctgtgcgcttaaatctggctttcagcttcagaatagagatggagtgtctgctgtcatgcaagtggacaataagcaaagccataggtaatctgtataccaaatgacccattatttgttggccaataccctgtttaacagatcttgtttaataatcagcacagagaaacctatcagcatagaacttacattatccagcatttgctagttatagctgtagtaacaaacaacctcaaaatctggtagcctcataaaacaacaaaagttaattgttttttcataactggttgtgctgtgttccctgtgtcttctcattctgggtcctaaaagattagctgtgatatggaatatgtttttcttgtgtcaaagaagagcaagaatctgagttaaacaatacaattgctcttgtagcttctggtcaaatgagatgaatgtcatattcaatctgctagccgaagaatgaccaaccaagcccaacttcaatgaggggatttggttgtaaaatatatgtcctggaagtgggggtggaaagtaagtctttggccataggcaaggatttataatcttcttactgagatggaaaagtcggtaattgggaataataatgcaatctcccatgggacttatgaaaaagtattacggtgcacaggaaggaaacccatatcctgaagacttgaggcaagccgacttataaaactttgagaggcccaggcgggcggatcacgaggtcaagagatcgagagcatcctggccaacatggtgaaaccctgtctctactaaaaatataaaaattagtggggtgtggtggcacgtgcctgtagtcccagctacttgggaggctgaggcaggagaattgtttgaacccgggaggcggaggttgcagagggccgagatcgcaccactgcactccagcctggcaacagagcgagattgtgtctttaaaaacaaaaaacaaaaaacaaaacctactaggaggaattcagaagaaaattttggtaaaatttagggtacaaaatgaccctgtatgaaatagcagaataccataaggctgacattgagacaatactatcagaatttagagatgatggccaaagtctatatttttgccagacattgtagaatattctgatataaaatcaggtgtgggggaaaaaacaaagaatgtttttctaattccttttggtaacttctcgttgaattaaaaactgtatatgtgccttcttttggatttactggagaaagtaaaaattaaaaatgtaatggttacaaaaatacggaaaacaagggaatgggaatagaaccataaagcaactgttaatataaagtaacaggttatataacctagagatactattaactgttaaaagacagaaactcacatattcattcaataagccagaatccaaatatgtaagctttaaagagaaactgtttcatttaaaactaaatggtaaagaatataggtctcaatttttggtctgctgtagtctggcaatttttttcttagtataccactaataaaagtgtagatagtatactaataaaaatgtggctattttgtcccatatagaatgcatggatggtatctttttacctaagaaagcacatattcctcatttgctggttagaataaaatcatttgttaagctacacagaaataatagaaaatagtccaccatgtttgttacattttatctagaaagtaggttaggtcactcactactaagctattccaaaacgttccctaaaattttacttctcatgggatgtgggcccttttgcaactattcattttcacgtaattcatggtggttttatactttttctataggaagtgtcaagacatactgcatggcttgaatgataaattttctatagtataggtacccatactaaagacatagtagtagtagtagattattataatagtaatattacctatttctgaagtatgggtacagatgcttgtttctttctgcactgtgtagtttttagaacaacacaattctcccttttcaatggttgcctaatgctgagttggcaccttcaaattattttgtcaagagagtataggggtcatgtaccatataaaattaaaaaattgtttatttccatatccagaacatgcaggtaacttttgtccctcctagtacaactgtcgtacatattattttaattgatatcattgaggatctctcccttggtggcctatgggtgcctattaatgcatccagcatttagaaacagggaagtcctttgcaggatcattttgacattactttactgaggatagtagtcagggacttgagtggggtcttacgtatctgatggaaaaagaagattcatacattctctgacaaagaggttatgagcaaaacctctgcctttaattatgtaatttctagatattctttatcagaaagtccaagctgaaattggagggtaggttacaataaggctcagctggaagaagaaaatatttttgccatggagaggagggcatataacctttggggcggtaaagctgactcatagcagtttgggtatttggtatgtatcccttgtaactcagccaagtacactaggtagcacatctttaatatagttgaagaccagacttaaataggtttagaaacataaggagttctagtagataagcactgttaggaagcaaagggtaaaaagtttagcactaattggttcctgtgaaatcaatgtggaagtcaggcatgagacacataaatttatttactgccaaatatttttacagatggaaatgagatacaggagttggtacctttggtatcttatgtatagtgaataggaccaggtatgatcccttccagcaactcttggtggagctttaatgaggatccaatgtcagaccaaagatgctggcattcatcatcccaagtttatcagtagggctttttataccgctaaaaggtttaccttaacacaatgactttatgatttaaaacatcgaatgaaatatgtatacataaatgcttcgtagtatggcttgctgctggaaggcctagagggaagtttcatgtgcctcacactcagcaattcatgggggaatagcaggagtcctatttttctggtggctgtatatctcatcagggttatgagcatctgcctattagagcctaatttttgtacaaatcctagctatttattatttttgaattctatcttggcattttctgtatttgtggtgaaaatattgttgaagttgatcttctttagacacttcctttgcaatatctttattaatgggcaaccatactctgaatctaggtattaaattttatatgacagcttttgtgaatggatttacttagctatcttgataaaatacatatattattttttgaactttttttcatagaaacaaacaaattcaatctaaatatttattaatggctttcaagatgggcaagctttttttttttaagtgcttatctccattttgcaacaggcaaatatggcaggaatgacaatatgtgtgaggcatttgagaaaacagtttggaggatattaacaatgtttgtttgcataactttttattttttaccttttatgccaactcatttgcaaagaacagaagattttttatataatctaacagcaatttgtggagtataaaaaagtgaatcttgtttttaagagtatttttttcttttcttcaaaatttattttgttgattaaaaatactttgcgaaatttataggtgtatgtgaatatttgttacattcatagaatgtgtaatgaccaagtaagggtatttgatcatcaccatcaccttgagtatttatcatttccattttggtaactttttttttattatactttaagttttagggtacatgtgcacaaagtgcaggttagttacatatgtatacatgtgccatgttggtgtgctgcacccattaactcgtcatttaacattaggtatatctcctaatgctatccctccccacttccccaccccacaacaggccccagtgtgtgatgttccccttcctgtttccatgttttctcattgttcatttcccacctatgagtgagaacatgcggtgtttggtttttttgtccctgagatagttagctgagaatgatggtttccagcttcatccatgtccctacaaaggacatgaactcattattttttatggctgtatagtattccatggtgtatatgtgccacattttcttaatccagtctatcattgttggacatttgggttggttccaagtctttgctattgtgaatagtgcctcaataaacatatgtgtgcatgtgtctttatagcagtatgttttataatcccttggatatatacccagtaatgggatggctgagtcaaatgatatttctagttctagatccctgaggaatcgccacactgacttccacaatggttgaactagtttacagtcccaccaacagtgtaaaagtgttcctatttctccacatcttctgcagcacctgttgtttcttgactttttaatgatcgccattctaactggtatgagatggtgtctcattgtggttttgatttgcatttctctgatggccagtgatgatgagcattttttcgtgtgtcttttgcctgcaaaaatgtcttcttttcagaagtgtctgttcatatacttctcccactttttgatggggttgtttgtttttttcttgtaaatttgtttgagttcattgtagattctggacattagccctttgtcagatgagtagattgcaaaaattttctcccattctgtaggtggcctgttcactctgatggtagtttcttttgctgtgcagaagctctttagtttaattagatcccatttgtcaattttggcttttgttgccattgcttttggtgttttagtcatgaagtccttgcccatgcctctgtcctgaatggtattgcctaggttttcttctagggtttttatggttttaggtctaacatttaagtctttaatccatcttgaattaatttttatgtaagatgtaaggaagggatccagtttcagctctgtacatatggctagccagttttcccagcaccatttattaaatagggaatcctttcccatttcttgtttttgtcaggtttgacaaagatcagatagttgtggatatgtggccttatttctgaggactctgttctgttccattggtctatatctctgttttggtaccagtaccatgctgttttgcttactgtagccttgtagtatagtttgaagtcaggtagcgtgatgcctccagggtcgggttacccacaaagggaagcccatcagactaacagctgatctctccgcagaaactctacaagccagaagagagtgggggccaatattcaaaattcctaaacaaaagaattttcaacccagaacttcatatccagccaaactaagcttcataattgaaggagtaataaaatccttacagacaagcaaatgctgagagattttgtcaccaccaggcctgccctaaaagagctcctgaaggaagcactcaacatggaaaggaacaactggtaccagccactgcaaaaacatgccaaattgtaaagaccaccaaggctaggaagaaactgcatcaactaatgggcaaaataaccagctaacatcataatgacaggatcaaattgatacataacaatattaaccttaaatgtaaatggggtaaatgctccaattaaaagacccatcagtgtgctgtattcaggaaacccatctcatgtgcagagacacacataggcttaaaataaagggatggaggaagatctaccaagcaaacagaaaacaaaaaaaggcggagattgtgatcctagtctctgataaaacagatttaaaccaagaaagatcaaaagagacaaagaaggccattacataatggtaaagggatcaattcaacaagaagagctaactgtcctaaatatagatgcacccaatacaggagcacccagattcataaagcaagtccttagagacctagaaagagacttagactgccacacaataataatgggagactttaacaccccactgtcaacattagacagatcaacgagacagaaagttaacaaggatatccaggaactgaactcagctctgcaccaagcggacctaatagacatctacagaactctccaccccagatcagcagactatacattcttttcagcaccacaccacacctattccaaaattgaccacatagttgtaagtaaagcactcctcagcaaatgtaaaagaacagaaattataacaaactgaaactgtctctcagaccacagtgcagtcaaactagaactcaggattaagaaactcactcaaaaccgctcaactacatggaaactgaacaacctgctcctgaatgactactgggtaaataatgaaacgaaggtataaataaaaatgttctttgaaaccaacgaggacaaagacacaacatagcagaatctctgggacacattcaaagcagtgtgtagagggaaatttatagcactaaatgcccataagagtaagcaggaaagatctaaaattgacaccctaacatcacaattaaaagaactagagaagcaagagtaaacacattcaaaagctagcagaaggcaagaaataactaagatcagagcagaactaaaggaaatagagacacaaaaaacccttcaaaaaatcaatgaatccaggagctggttttttgaaaatatcaacaaaattgatagaccgctagcaagactaataaagaagaaaagagagaagaatcaaatagatgcaataaaaaatgataaaggggatatcaccaccgatcccacagaaatacaatctaccatcagagaatactataaacacctctatgcaaataaaccagaaaacctagaagaaatggatgaattcctcgacacatacaccctcccaagactagcccaggaagaagttgaatctctgaatagaccaataacaggctctgaaattgaggcaataattaatagcttaccaaccaaaaaaagtccaggaccagatggattcacagccgaattctaccggaggtacaaggaggagctggtaccattccttctgaaactattccaatcaatagaaaaagagggaatcctccctaactcattttatgaggccagcatcatcctgataccaaagcctggcagagacacaaccaaaaaagagaattttagaccaatatccctgatgaacatcgatgcaaaaatcctcaataaaatacaggcaaactgaatccagcagcacatcaaaaagcttatccaccacgatcaagttggcttcatccctgggatgcaaggctggttcaacatatgcaaatcaataaatgtaatccagcatatgaacagaaccaatgacaaaaaccgcatgattatctcaatagatgcagaaaagacctttgacaaaattcaacaaccttcatgctaaaaactcttaataaattaggtaatgatgggacatatcttaaaataataagagctatttatgacaaacccacagccaatatcatactgaatgggcaaaaactggaatcattccctttgaaaactggcacaagacagagataccctctctcaccactcctgttgaacatagtgttggaagttctggccagggcaatcaggcaggagaaggaaataaagggtattcaattaggaaaagagaaagtcaaattgtccctgtttgcagatgacatgattgtatatctagaaaaccccatcatctcagcccaaaatctccttaagctgataagcaacttcagcgaagtctcaggatacaaaatcaatgtgcagaaatcacaagcattcttatacaccaataacagacaaacagccaaatcatgagtgaactcccattcacaattgcttcaaagagagtaaaatacctaggaatccaacttgcaagggacgtgaaggacctcttcaaggagaactacaaaccactgctcaatgaaataaaagaggatacaaacaaatggaagaacattccatgctcatgggtaggaagaatcaatatcgtgaaaatggccatactgcccaaggtaatttatagattcagtgccatccccatcaagctaccaatgactttcttcacagaattgtaaaaaactactttaaagtccatatggaaccaaaaaagagcccgcattgccaagtcaatcctaagccgttttggtaacattttaagtcctctattccagctactttgaaatgtgccctacattgttgcaaactatagtcactctacactgatattaaacatgagaactttgaccaactatctaactgtatgtttgtaccgactaactaacctttgtttattcctcctgctaccctggtacccttcccagactctgtatctatctttttactatctgcctccatgtgatcaattgttttagtgcccacatatgagtgagaatgtctttagccatttgcctgttgatggaaacttaggttgatttcatagctttgcttttgtgaatagcgctgtgttaaacatgtgagtgcgtgtatcactttgatatacagatttcctttcctttggataaatactcagtagcaggattgctgggtcgaatggtagttctattttaactctttgaaacatctccacactcttttccatagtggttgtattaatttacagtgtgcaaaagttccattttctttagatcctcaccagcacctgttattttttgttctacttataatagctgctctaactggggtaagttgatgcctcattgtggtttagatttgcattcctcttatgcttagtcatgttgaatattttttcatatacctgttgacaatttctgtgtcttcttttgagagatgtatgttcacgtccttagcccactttttaatggggttattttttttttattgttgagttgtttgagttccttgtatgtgctggatattagtctcttgtaggatgaatagttagcagatattttctccagttcaaacacaaattgtctcttcactcttttgattgtttcctttgctgtgtagaagctttttagttttatatagtctcatttgtctatttttattatagttgtctgtacttttgaggtcttaaccatgaaatatttgtactgaaacaataaaacaactagaaaaaaacatggtgaaaacacttcaagatattgatctaggaagagatttcatgtctatatttaaaaattaaaatatttatattaaaatgcttccactaaagttggtacctaatcttatataaggaaattttagagtacactctggagaagtccagtcagcacaacattaaaagtatgaatttggaagtggaagggattacagctttggctgaagcatgagccactattaacatcatcatacagcttttggtcagcaatgaattttataatagttacggcagaaggaagttgtaaatgatgtaagtcataaagtagcattaaaataatattccagagagatttttttcaatagtaggcaaggaattcttattatatgattgtgtaaaatcatgaacagcttcagaactgtaaaagaagtcatggcatctatcaacattacagcccaaaagtagacatttatgaaaggcatggatatatgctctagagagagcatcaactttagacaatttcagacacttggacagaatagtcagaaggcaaaataaaacgttttgttacttgatgtaggaacaaatggtataaccagagaaccttgtagactatatttgacgtacattagagataagatgaagattttgaagtaggaggtttgttaaacgatgttggttttcatcaagtggtcaagttttctatagctggagtttggagtaaaggggttggtacggggcaccaatagtaatgtaacacagggaagaagaagactttatattttccaggcattagaaaggtgcagtgttttggtattttggataggtactgaggtatcacctaccatagttagtgtcagacaggaatctattacggaggttgaaaaatcctccattattattgcagccatagctactgaatgcaatccaaaaggcaagcaagctgctatgagattaaggggagaacttcagtgagcaattggatattgtttgttcttttgaatctcccttaatgtaccctaaataattccatacttcaaaagaaaggtaacaggtttaatataattaggaaaactcaatatagggactttggacagacgttatttaggaaactgataaatcttttcagttttctggttctgtgatgacagcctgccagtttttatggtcgttgagctattgtaatataatccaatttccatggttagccatagccatgtggatttctcaaactatatggtctgggggtatcccagatagcttctatttaggaaaatgcaaggtgatgtttttagtagaacttagtaaaaatttggcttttccagtgtattctgggtcaagtttattggagtacttgatatgaaagataactaagaattagatattaggctggtagggtctctgaaatacatagtagtatacaaactttttttaaaaaaaatctaaccaaaacagcatggtaccggtaccaaaacagagatatagatcaatggaacagaacagagccctcagaaataacgctgcatatctacaactatctgatctttgacaaacctgagaaaaacaagcaatggggaaaggattccctatttaataaatggtgctgggaaaactggctagccatatgtagaaagctgaaactggatcccttccttacaccttatacaaaaattaattcaagatggattaaagacttaaatgttagacctaaaaccataaaaaccctagaagaaaacctaggcattaccattcaggacataggcatgggcaaggacttcatgtccaaaacaccaaaagcaatggcaacaaaagacaaaattgacaaatgggatctaattaaactaaagagcttctgcacagcaaaagaaactaccatcagagtgaacaggcaacctacaaaatgggagaaaattttcgcaacctactcatctgacaaagggctaatatccagaatctacaatgaactcaaacaaatttacaagaaaaaaacaaacaaccccatcaaaaagtgggcgaaggacatgaacagacacttctcaaaagaagacatttatgcagccaaaaaacacatgaaaaaatgctcatcatcactggccatcagagaaatgcaaatcaaaactgcaatgagataccatctcacaccagttagaatggcaatcattaaaaagtcaggaaacaacaggtgctggagaggatgtggagaaataggaacacttttacactgttggtgggactgtaaactagttcaaccattgtggaagtcagtgtggcgattcctcagggatctagaactagaaataccatttgacccagccatcccattactgggtatatacccaaaggactataaatcatgctgctataaagacacatgcacacatatgtttattgcggcattattcacaatagcaaagacttggaaccaacccaaatgtccaacaatgatagactggattaagaaaatgtggcacatatacaccatggaatactatgcagccataaaaaatgatgagttcatgtcctttgtagggacatggatgaaattggagatcatcattctcagtaaactatcacaagaacaaaaaaccaaacaccgcatattctcactcataggtgggaattgaacagtgagatcacatggacacaggaaggggaatatcacactctggggactgttgtggggtggggggaggggggagggatagcattgggagatatacctaatgctagatgacgagttagtgggtgcagcgcaccagaatggcacatgtatacatatgtaactaatgtgcataatgtgcacatgtaccctaaaacttaaagtataataaaataaataaataaataaataaataaataaaaatctggctgtattagtcagtgtaggttatatgatatcaaattagccatgagaccttagtggctttatacagtaaaggtttatgtagtgttcctgtaatcaaatatagtttcttcagcaatctaaggtattgggtttcaccatcctatttcagagtagcccagtattcattgtaggaggcggggagagggactagagaattatgcataggtttttcattgttgcaacccacaagagatttctgataacatttagttgatttagtcacataattaactataatggggttaggaaatgtcttctgtatacacacgaagtaggaaaatgacatgagaattattaataacaaacattgtctctagcatacttggtttcttagctggtaaaattaatgggttgcaatggttcttggttagaattataggttttggtgtgaaaggatttgacaactattagggatgtggtggcatagcagtattaaacctgactttaactgatgtgatgctatatgccaatatctgggcatattgaacaactctgtctaattagtatgttgagatcaagatgtggggactcagaaggattttttgagtcatcttagtttggagcttcattcaagtcagtaagaatacaaaaaaatcagttccaattctggttaaggtagagtgagcacactctaccctgtttctcctactcaatgcaagaaaaacaccctacatggacagaattcacacagccactatttcacagctctgaaaagtgaataatagcaggtagaatggggaacaagagcagaattcacagtgcctttgaactggaagtgagttcactatactttttgtccctttattatcccctaacatgaattaaatggattgaaaacctgaaattgtgcaccagggtgcagtgagagacaactctgggagaaatcctctagttctgagtgccctgttaatttttcttttcttcacgttgttctgttatggcccagccctcatgtggtcttatcaccaatggaaggctatagaagccaaaactctgagggaggcttttctttgatcagtggagctagagtcctaagagggtgggacaaacacccttttcttcttaatctctctgcctttctgccagtggccctggatatgaacagacttgtagaatacattgcagagcagagaaactaaagccccagcgttttgacagaagaactgaaaagaagagcctcagaactgaaaatatcagggatgtcatggaaagggaagaacatgagaaagtaaccctgtaaaattttttaatgaaattcagtcctgagttgtgcatacatggatctaatccaaattacaagttgtagctgctacaataaggtaagaaaatgaaagtcatacagattataaaggaaaaatagaattatctgttttcacagatgacatgattgtctatgtaaaaattctcaaggaaatgacttacacataaattctagcactagtaagccatgtttagcatactagtgtcacaagatacaaggttctcatacaaaaatgacttgtatttctttatattaacaatgtacaatgtgaaaccacatttaaaaataacattaaccacagcatcaaaaatgttaaatactgagatataaatttcacaaaacatgtacaggatgtgtatgctgaaaactacaaatttctgatgatagcaatcaaagatctgaataagtttagggctatatcatattcatggacttaacatataaagatgtcattaaattggtagatacatgtaacataataacaattaaaatcctagctgaatatgttcattaatgtagacaagatgagtctaaaatttatgttgaatgacaaagtaactaggatagttaaaacagttttggaaaagaataaagttggaagaattatacttaactgactttaagactgacttttaagctgtaataatgaagaccgagtaatattagtaaacacatatatcagtgaaacagaatagagtccagaaatagtcccacacatatatggacaattaatttttggcaaaggtgcaaaagtagtctaatggaggaaggataatcatatgccaaacaaatgtgctttgacctaaacctcacaatttatatgaaacttaacaaaaaactaagtctaaatataaaacatgaaactctaaaacttttatgggaaacgtataaggaaatttatgggacttagggtaggcaaagctttcttagttgtgacgacgaaagcataattcactaaaaaagggataaatttcgttttgactttgtctaagttaaaaacttttgctatgctaaagatgcaatgaaaagacacagtacaggctggaggaagataacagcaaattgcttatttgacaaaggatttatgtcaagaataaataaaggactttcagtccttaacaataagactacaattcagtttttaaaagtggacaaaagagtagacactttaccaaagagaatataaggatgtcaaaatagttcatgaaaagatactcaacattattaaccaacagataaatgtaaattaaaactatataaaaccattatatacctagtagaataaaaaatagctgttgtgctaaatactggcaaggatgtgagaacaactagaacctgttactggtgggattgccaaatggttcagccagtctgaaatacagtttggcagtttattataaagttaaatatacacttattgtatagttcagcctttctactcctcggcatttatttatgagaaatgaatggaaatcatgtccacacaaaagcctttatgtgaatgtttatagtagccttattcacaattgctattctacaacccaaatgcttttacaaatgaatgggtatacaagctgtggtacatccattaatactcatcaactaaaaagaatggactcgatgtatgtacttacttggatgcctctcagaggcaatatgctgagcttacaaagggagacttagaaggctacagactgtatgattccatctatgtcacattcttgaaaagtaaaaatatgtagtgatagagaaaagggataagtactagagcctatgggtattgagaaggtgtggctataaagctgaaaagtgatagcacaagtgaattttttggtgtgatagaactgggctatattttgattgtggtggtggttatacaaatctatgtatctatttaacattctcaaactggtacaccaaaaaaaaaaaaaagagaaatttcactgcatggtcatttaaaaaataaaattaactattaaaagaatagaaaattcctgacctgtgtaaagcctaagtattaaagaattgtttcaactttgtgtattcagctgtttatctgtttattttcttgcatttgcgaattccagcacttctagtgtatgttaatcctatttctcttaaataggttggggcttgggtgaaagtggagccagcaccaagataaaggactgggcatttggccttcctgctgtggcatgttttgaccttgaagggcattagagtatgcataaatagttaagatcatccatgtgtaattatgacctgtttccaatttagaacttaagttctccttaggggttaggaagttacattattaaatttctaaagcattcatctatccatatttactatagtggtggctgccatttgtaaaacgtccaggacgttttcataaagtgactacaacatttagtgcactgtaaggggtggtttgttagttgtggttaatctgtggtactattaggctttgaaagttatttcttttacctttgaaggcttttagtaaatatatgaaaggagcttataataaaaaggcattttgctctcaaactatataaattttgttacatactatatactaatatatagtaatataagagatttataatgatttttttacatatgaaaattttaacattttgttttcctcagaagacaaattgacacatttcaagcacttttttatacttcttaaaactatatttgtcaaaaataaaatacgctatacaacataaaattaaaaatctctgacaagacaaaggaagatataaatgagtaataacctcacttttaatagagtctctaaggaatgctcttaaatatccatgacagtggtagcaattcagtttataaggctgccttgcctttttatcaggatgaagaaaaaggtagaaattactgagaagagatttcatggctccgggcagactcagtgatttcatgtgctatcttatgtatccatctgtccttgtattttactgtgttgcatttcacagttttccttatttcattctgcatttaccgcctatgtaggcattggtcttctttgagatcacatcttcatgagggcgttgtctaaaagtgactgctaaatatacctggagttagaaacatgtggtttagccctttctaatgttgaactgtgaaggaaatttaactcttacaacttattgtgagttttttgtgtgtcaccgaaaattatcttggatgcgaaattgtcttgggtgtggacttgaattgattaacgtacagtgaaatcaattatttctgctatgatcactctcatttaggaatagttttgtagtgagagaaatactatagaaatatgatattaaatattttacataattttaatcatcttttaaaatatttcactgtaattcagtcctaaattaggcttaagagatgaaaccttttaaaaatgtcaaaagatttttcccccttactgataccgtaaatctgatttggaacttaatctacttaatcaattactttgcaacattcttttaaaaggggtggaggtattggattttagggggaatctttactttttatgtaaggtatttccagtcttcttaataaaaaggtgtttatttaaaaagccaatctagctgtggtacttagctttttcagtaaaaaccaaattgaatagccagtttatgtcttcagagagctacctttgaacagaacttaggtttatatattcactcttaatcattttagttatgaattagttgtatctttatgatatattgaattctaaataatataagtacctcaaagataataaaactttatggatcacattacatgagttatctacattagttattaaaaaaattaaatacaaattgaaatggataaagttacagtaaaataagtcaaaatctatatttaaattttaatggaatataaatatatatattttattataaacaaattagttatgtttatacatagttaataaatattctcaggtatttgtgggccaagactgttgtggtattctttatcaataaaggccaaaaagctctggagaagtaataaatatgctaatttataagagatattattatactatttctttcatttttttcccatggtctagccctttaaaatatgatacttgaaataaatgttagtttctaacttaaatgaagcttattaagaattacaaggtggtaattatttttaagaaaaaacacccactaggttattaacatcattttccttaaaaagatacaggattacaaactcttatccattcttgaagtagaattgctacttacagaacatgtattatggtactgtctgttgaaaagtttagcaattatatatcatgacataataatcagcatacttttggtctatgaagtaaaatactcctatgaaaatctgttcctaggtattgctatacttttcaagagaattttctatgttgtattagttttggctgacacagatacttgctttttggtttatcctatagtatatatttagatcctctgcagatgaactgatgtgttctagacaggaagtggtatgtaggagatataggaatgggctgaagtatcctttatatttgcctttgtatctaggggagttggaaataggcaagaatggagagaaattttgtatggcagtacacagaattttgcaagtttattgtgagccctgcaacaatccgatgcattttagttactggtaagtttgttaaattatgtttgaaaatgtacctcttcgaagatggccatctatttactattacgtccaccatgtcaattataccttattgtaaagatttttttttttttttgcaaagatgtggtattgctattgcattgggttttaggtataaattaaaacgacttttgttagtgaatgcatttgacatttcaattggtgtcctggttaatattgaagtgaaattaacactttatggatagcagagtcctgtgttaagattttggaataataatattaatatttctgtttttgtaatggaactccactgtgtttagaggtctgagttaactcattagatgtttgagagtgagtagttattctgacataaaagaatgagaaaatccatgtcatccttgcaattttacatggttctatatagtagggcgatttactgtaagaaatacttttttgccttttttcatggatcatagggaccattgtgaggcatttctagtcgttctttttggcagtgctcatgcttaggaatccattttccccctaaatcactaactttggtgtatgtaagaattctatgaacagattaggaaattgtgtaatctctacccatagttttctttattctttttaaatatctaggcagaagtgttaggtgtaatatagtacttagcaattattcgtgaagtggccttgactattcaattcatttaaaatggactagattgcttaacagctgtgcttctttacagaaacatttttttaaatcccaagagattccttggtagttgtatttttcttgtaagtgtctgtctttggcttaaggacaaagtaaaagaatatcattgatttgtgatagtttacttttttttgtggtttaaggatataggatcagttaatataattgaattttaatttcctgtaatgaagtactttatttctagatactatattttgtctagctggtatgtaattcattaaactatgaatttttataataatgataatgataattttgctgttggttcttgttatgagaacatttctaatttgaacaaaagtagccacattatgagaaaaatgtattatccctattgaaactggaagagctagaataattcaaaaattagaataacttcagattccttttgggctttaataattttcaagttttccttattaccagattgtctgaatcacttgtaagaatgagtacttctgcatttaaaatatgtttagaaatttgtggttttaccctttcttatgaatataaataggtaatttatggtatattataaaacattgtaaattgatactattttaattcatgataaaatctggtctataacaatttattttgagctacattaagcatatacaatgaaggaatatgtatttccgttatttagaatactatattcatgtatcagtgttgctggttaaaatcattatatgtaactgtgaagtaatgcattatcaaagcttaattcaatgcaatcatttctttttattttgtttcttcattgattccaaagacaaatcaagtgcttaactttgacacctctttgtctgcttttatgtatttgtttatatattgtgtaattgtcacttttcatttcaatattacataaatcattttatttgctctcatgagcttttcttagggcatacctggacataagtgacatgttacatatttctctggattttttttaatgaaaggtttttgaagaatagttctaaatgaaaagtttatttaaaaatagagtttgttgttacaaagcaatattgcatctatatttaaaattctctacaatagcttgttattcaaaagaatagtatgatacaggctttattatgatacattataaatgatgtgtatatgtttcttaggtttacttgaagccagacatataaatatacgtagagataaactttgatgttttactttggaatgtaaaaaaactacacagttatgattcagtttattatatttaatttgtaaaggacaacagtagttttctcatgcttatgaggaaatatattctttcataatataaggcataatagtcattgtcagtaaaatagagatgagatttgaatatggttatcttttggcataataaaatactgaagtgggacactgtttataataaacatgtgatgattacataatgatgtctgtactttacatgcagtgctactctgttggcattcctggttgaactacttaaaagttcagtagccatgcaagaacagatgctgggtggaaaaggctttttagtcattggctacttacttgaaaaggtaagtgatatgtgttgatggttttattgtgtagcttcacagttggacagctgttaatcactaatttttttttctgtaatttcactttccattgactgtgtagagattatactatttgctaattcacaaacgtcttagatttaagtgtagacatggaattaactgggtatcggaagtgtaattaagaaattttgaataaaaaaatctaaataaaaaatttacatctatatctattcaagcaataagtatcatttctcttaagttttctaagtagtaccccctttatttctactctcactttctaaggtgtcacttacccatggtcaactgcagttcaaaaatagcatggaataaaccatttataactttctaaattgtgtgctgttctgaggagagtgatgaaatctcatgctgtccctcttcatcaagccctggacatgaatcctccttttgttcagctttttcatgctgtatacactgtctctccattagttatttagtagctatctcagttctcggactgaaaatcgtatttattatccactaggggtcttggaactatcgcgtcaggataaggagggagtactgtagttgtttctttgctatcttttcacttagacttttttttttttttttttgagacagtgtctcactctgtctcccacagtggagtgcagtggcatgatcttggctcactgcaacccccatctcctgagttcgatcaagcgattctcctgcctcagcctcccgagtgtctgggatcacaggcgcgcaccaccatgcctggctaaagttttttttttttttttttgagatggagtcttgctttgtcacccaggctggagtgcactggctcaatctcggctcactgcaagctccgcctcccaggttcacgccattctcctgcctcagcctcccaggtagctggaactacaggcgcccaccaccatgcccggctaattttttgtatttttagtagagacagggtttcaccgtattagccaggatggtcttgaactcctggcctcaagtgatctgcccgccttggactcccagcgtgctgggattacaggcatgaaccaccgcgcctggccttagactgtatctcgaaagtcttttttattaagataaaaatcttaatctatatttagtatacatgaatttacctgttaagttttgtgttattttttaattatgcggtcaaaatttttattttgtggtaatagaaacattattttgtgctctttttccctgctcttaatatatattatttaaagtagtttttctgatctacgcataatataaacaataaaaattagatgggtttactttttcccattttgtgtcatttatgttgttttatgacctcttttgctttagtcaaagctgtgcttttatgatgagtgctgaatttctgattatgatctcacaggagtttagttgtattatgtgatttcctttgaaaattaaagtgggatttcatgaataagcgtttttttataacaaatacctatgtcttttattagcactctctgaccttttcttatcagttagttaactctataatattcagctgctctgaaaatgaaactgttggagaagtaatagaagtgagatctcaactaagggataaacatatttcctttgcaaaaaaattgagaagatattttgaagtagttttaattttacctccaattgttttacatttgaaatattatcaattgattaatggataaacaaaatgtggtatatacatcaattgaatattatttagtcacaaaaataatcaagttctaaaatatgctatattttatatattacatgtctttatacatattgtgtatataacatgtcttttctttgaaacaagtgttgacctttctttaaggattaatgattgaaaagtggtagattgttaagtagattgatcattggtagcatttctttattaagatgattttttccataacattattaagaacttaaggtcctttggcttatttttttgaatgacagaatactctttttctgtatctagagtataatatttgtttagaagatgtatgataagctacatttaacatgaatttgataacatatgaaatgcctttgtaagattactgtgtgtgacaggatttctgtgaggacttaccccgttaaataatttgctttcatttgtttgatgagaatgtatcagaaaattctaaagtaaatattcttttacttaaaacttagcttataattagaaatatttgtaaaagccttcaaataaagacatatgttaatatttcaaatattataatgtcaatttagtggatgcaaaatatttcattgtggttttaatttgcacttttcctagatttcgaataagattagacattttcatatataattatagaaaattaatcttttatcttctttgttattcatttcctttaccagtattccctatgtctcttcatgattcccacccctagtcaacccataattcactttttggctttatgaattgcttattctaaatatttcacataagtgagatcatacaatatttgtctttttgtatttggtccattttgcttagcataatgttttcagtgtgcatccatgttatagcatattttagaactccgttcttttttacagctaaatagtattccattagatgtatatacattttgcttctccattcatcagttgatatacatttgtgttgtttctatcttttggctattatgaataaagctgccatgaatgttcatgtgctaggttatatgtggacatatgtttttatttctgttcagtagatacctaggagttaatttgctgggtcctatgtttatttgagaaactattgatgtttttcaaagtgactccagcattttacatcctaccaaccatatttaagagttccattttttccacatccttaccaactcttgttttgtatgtctttttgattctgaccctcctagtgggtgtgaaatggcttatcaattttaaatttgcatttttgggatgactagtgatgctgaatatcttttcatatgcttgttgtctattttcatgtgcttattagctatttattgatatatattctttgaagaaatatctttagatcctttgcccatttaataattgtgatatgtgtcttattattgatttgtaggagtttttttttaatattctggatactagtcccttaatagacggatgattaacaaatatatttctccattctttggatcacattaatttgtatttccttgatgacaataaagttgaacatatatttattttcctttgggatatcttcttttgttaaatacctctttagagtgccaattttcatttgggttgtctgtcattttgttactgatttgtggaaatcatatatgtattttggatgtgattacttcattggatatacactgcaaattatctcttcttctttggtgtgacttttcactctcttaatggtgatttttgataaacaagttactaattttaatataggttaaaattttcagtttcttttatgactagcccattttagacccatatcctgaagccataagattattctgtttccttcttaaaattttgttttatctttcatatttagatctataatctatctggaattgaattttgtatatggtatgaggtataagggtcaaggttctttttttctataatctatctagaattgaattttgtatatggtatgaggtataagggtcaaggttctttttttcccccatgtatgtcatctagctggcccagtaccattttttgaaaagatgatttcccactgcattgcagtctaatctttgccataaatcagatgaccatgtatgactgggattttttttgtgtgtttcagacagtacaacagtattttaatttgtatagctttttagtatggcctgatatttaagagtatgtcatctagctttactgttgttcttgaagattgccttggctgtttttgggtctttccatttccatatatatatatcagcttatcaacttccaccaaaaaacatgaggatttttattgtattatattgacatctttcctatattgaatctttcaggttatatacttggtatattcttttactaattgagattttcttttgtacttttctgtatggaacagtttctgtctttttgatggatttatttccaggtatttgatattatttgatgcccttaaaattttaatattttacacttgatcttacccaaaaggccaagaagcaattaaaagttttgatttttgttactggtacatagaattataattgatatttatgttgaacttttatataccagtctttctgttcctctattaaatctagtcatttgtagattttttcagaaaaatttttgtagacaataataacattggagaatgatagttttgtttttttcctttctaattttagggtttttttccttgccttgttatgccacctaaaaagtgccagtacagtgttgggataaaagttgtgatagtggccatccctgtcttattcctgatctcatgggcaatgcttttaataattacactaagtatgatatttttaatagattactttgtgtggattttttagttaaattaaggaattatctatttctggtttcctaagagttttctttattataaacaggattttatataacatcttttctgtagtacttgagatgattaagatgtttctttatttttcttaatttagtcaattacatggattatttttcagattttaaaccttccttatattcctggactctcgtttactcctaaacctactcctattccaacctggttttcattcttacatgtcctttaagatggctcatgtctttgtcaccagtggccttcataatctgtcctgtgattatttctcagttcttatcttatttgacctgtgaatatttcagttgaacattctttccttcttgaaatgctttcttgcattgtgttttgtgatggcttgctttttttttttcttacttattctctctcattagttctgcttcatctttctaaattctgatgactgttctgtcccagtgattaatcctggaaagcgtttcacttttccatctacacagtaccttactctaattgagattatccacttctacagtttccatgatcctgtaaatactaattactctcaattgtttctcctatttttagttccacttggatttctggtaatcttcttgactaaattatccaaactgatttttctcttaatttttcatccttcagagttctttatcttatttagtggcattactattcaacaagtagttgaaaccaaaaagttaattctttttgactctactttttttgcgctctagatccaaactcaggaaattatgttgtcttactgtcaaaatgtatccagaatcaattactacttcctctttacttctcagctccttaccatgtcagttgatatcatcttagttcaaaccatgatcatccttcaccattggttacctacaatccatttttcacttgcagttagactagttatcctaaaatgtgccaaatcttattcaagtcttcatccttctcataatgaagtcataagccttatacctcacttcatctcttcccactcttcttgctttctctattttaggcaaaggtctttttgccttttccttaagaactaaaatggtaaacatttacccaaggacttttgcatttacttcccccattgtttccatcactctttcttcagatactcacagactttgattctatgcttcattcaggattttgcttatatgatgccttatcacagaaatattctccgatcattctaaataaattagtattccttccataaccatcagtgtttacctatgctgctaattttgcagcaccattctggcatgttttatattttttactaattttctgcctccttctgctagaatgtaggctttatgaaagcaggggcaatgtatatatatttttgtctccccttattgctgtatcttcagcacctagaacagtgcttagctcagtaaatggttgttgaattgagtatatgaaaagtccttgtatgcttgtctgattacctgcaaagagtaacttttttacctttcttggaggagtgctcacattttgttatttttaaataatcactggcaaggttagtattaatagtataggtaatagaagtttcattttttaatttcttaactaataacaggttactggttaactgccacttagcttttatatctccttgtcatagaagatgtcttaggaagatagtatatgagaggcctttttattaataacaattttactgttccacgaaaaaatttttaggtgtttttgttctgttttgccaaaatgtgatcttgtgggaaacttagaggttatccagcgtattcaataggatatttttgattgtggttagtagaaaatttgattcaaagtatcttaaacattaggaaaatatactaactgatgtaactgaaagcctagtgttagatggcatatcagttatattcttggcagggaacagatggcatactcaacctaggtttttgagaagactttaatgcaagggtatttaaaaagttgtaagcagggagcttggcaagatttgaagagatgagggaaataagtgtttagcataacccaaagagaaagttattgtagctattaggagaagggtacctgatgggagcgtggtcttcaagaaaggagtatagtgtaagtgtactgaaggggtaaaatctggaaaatatatacccaacttcattttctttctgtcctttaatttcttgctaatgtcttcaattagtcaaacccaactggaaaccagtaggcaagggagcatcccaagcataaaaataggacagggaaggttggaaaggcagcaaaaggttggaaaagcagcaaacagtaagttgtgtttcagggctgggttatctaagtctcaataatgtcatcagagacccaggttttatctatatctctgctgtaccagctacagtgttgattttatgctaaagctgatactctttgaggtcacaaggctgccagagagaattggcgctatagaccttcacatccaggtgaagaaagcgagctcatttctgtcaattactgagcaagattcttctctccaatttgattggttagcttagagcttggctagcctacctttgaaccagttgttgctatgagaatgctaaactttgatactgaatctctgagctgatcattgcctgccaccctcccctccactccctaccaaaacaacaacacatgattaatctggttggattaggctatttggagcacaaccttggagtcctgggaggagcagaatggataatagactataaggtacctctacaattacaatagttttacacaatttattgaatatatactcatacacattatatgtatatgtgtgtgtgtatattatgctttctacaataaaaatgaacatttctgataacctgttctattatgggctaatctaaatgttggaacaatctctctttattgaatagaagtttctctttgtaacctctagtgctcctatttggtttagttaattctggagtggatgctataacgcaactatttgtataacttcttagatattatttccaaatatggttagccatgtcacatatagtacttcttaaaaattatgtattctgccaccacatgaaagtaatatatagatcaaattccagagcttacattttctgtaagatttaaattgtatttccatctaaaggttacagatttataactataaattatccaagtatagatctctttctaaaatagctttacttgagaaaatgaaaacaaataccaaaatataaaaatattttaaaaccgttaatcaaaggaaatacatttaaaagcagagtcagagatcttctttcttcttttcccaggctgtgttttttcctacctattctattcttactgtttttgaatttgacattaattcagttaaacatttcctgagaaattagggtagggatcaggaggataaaagatgaataagataatatcctttcttatattaggaaagagatttcttttttacactaacaataatacaaggaggaaagataagtactactaagaggtaaaggtaacatgctgttgaagagaatattcatttatgcatttatatactatttacaatccaaaattgtaggattttgagtaggtcaataaaaagacacaattttagaaaaatattttccaaagaataattttagaatgcaaatctgctacccaacagcattaattggtatgcgaaaacaatggccccctccgccttttttttttaaagtaatgtagaaggccttgtgatgcttctagtataccttttaatatcatggtccaagttccaaacttgtttctatattatgaattcatcaagtggatatgtttataatggtcagcctgattttataatatgggttaatgttcttcatgaggacatgatgaataatttttatgagctacagtctggtcacctagcatgtttatctagtaacaggatctgactgtattctattttagagttttaagtgtaagagtagaatgtatcagatcatgttcttgaaatcattactactgaataaaaatagaatgtataagataagctatgtgaaattataattagtgaaggagctggctacagttttaaataactagtgatctcttattttaatttcatccctttacaaatattttttaaagtactatattattttcattgatattcctttaaatatgattacccgatctttactttttaaactcaaatacttgttttggttcccccccctttattaactcagctatttatttagatcatttccaccatcttctgtaaaattttcattgaaaattatgtactaaggtttggtttgaattttgtaggctattgcttatgtagtaagcaccattggtaattttgtcagacacataattctattatattaatactaaatcatttttaaccttataataatttgaaccaattaagtggcccccttcttagtaaaacctgttaaccatccttctgcaaatgttttatctgccccatagtttcttccatgaacttagtaacctctaacattttacatattttacctttttattttattaactatgtgttcctgccttatcatctcttagaatatgttctgtgaggaagagtttttttcttcaattttgctagctgcttttttgacagtgccagggagcatatttgactaatagtgagtaatcaacatgtatattttctaaatgactaaaagtcttgagttctacctttaaggtaaaggaaatgtatgcaagggtgttacaaactgggggagcaacatggtaaagcagggaagcaaacgtgtcctgtgggtgaaattggcccacagtaatattctgtaggactcagcaaagaggttagttttggtcctcaccaatctttattgtctcctactctagtttacacattgttgttagttatttgcaatcattttagttcgtgaccgtttatgtagaagtgtgaaaattcatgaagtgcttaagtcaaatatattgagttatccttattatgagcatgaaaaatgtagctaaatcatatgggaggtaaaattggtaagacaatttcatcccttttaaacttagattgttttaaactgatattcagacttcagttagtgaagaatagcgaggaaagatgtgttgtgtgatgtgtgcttcaggattgagtgataggtgattctttaccctatgactgaaaggatagtgatactacaaaatagtatcactagatgaggaagaaaagatttatgtaggaagataaattttttgatatttgagtttgaattatcagcttttatgaagagcatttttttaatattatagcatttttatctgaaattgtattctagtatagcattgtccaattaaattacaattcaagcctcaggtgcaatttaatattttctagtaaaaaaatacaggtggtattaattttaataacgtatttagcctagtattttattttgataatatgcaatatattatttcaacatctattcaataagaaaatatgatttttaaaaatattctgagctggaaaaacccagttttttcatacttatgacacatctcactttcaattgcaatattccagcagctcaatggccacatagggcttctggctactgtatgagatggtgcagctttaaggtttggtttcaattttggagagtctgttgtttaaataccattggtaataggtacatggtgatagtagttgaaaattcttgaagcgagtgttcagcatagacatagtgttatatgaagctgtgaaagcatactatatcatccaaggatagagtatttatggagaagagaaggccaaggaaataatattttaagcagtattttacatatttttaagcagtatttttacatattttaaacactatcactttttatttctatgtctaagatctcttcttgtatgtcaatttctacaaaaaatgaaatgaagccattatttataacatttcatttctttagctaatagtagaattatttaacttgaattatttatctgtaattgtcttagatcaggcttcaaataacaagctatcactcaaagaaatagctgaaattttagatctcttaaagttatattttaatagcaaagaaaacaaatgtttatttcatatttattagggatagcatatgaaaaattcatgtgtccttatgctaaatcagaaattatacaatttgatattctggatgtttcaagctagaatttctgttttctttcttagtcatcaagagttcatataactagagctgtcctggagcaatttttatcttttgcaaaataccttgatggtttatctcatggagcacctttgctgaagcagctttgtgatcacattttatttaacccagccatctggatacatacacctgcaaaggtatgaattttatacttattcagtttgatttagtgtaatgttatacattatagttgctggatctatagtattcagtggaaaacatttgaacattttagcttattttatagttaatctgtggcaattgtgttaggcagtatcaggagatcaaaatatttataagcagtaaaataaatgaaacaataggtaaaaaagaatctttgtgtaacactgcattctaacatctttagatgtgatacttacttttcaatgaagaaaatttgctataccaatttttgaaagactaggaaagagaacagataactaattgtattatgactgtaatcattttgctggaaaattgctttcattttgaaggtagaatttatatcatgacatgtaaataatactaatttaaaaataaatatatacatgaattaaatattttccagataataacagaaaattcttattgttttatatacaaggatttagtcctagttgaaatcaataatgagggatattttgattttgagctatcttttatagtttaaaaatatctcaccgagttattaattattgcctaagcccaaatctgaattttgacaactcttttttttttttttttttaaatgttttttttttttattatactctaagttttagggtacatgtgcacattgtgcaggttagttacatatgtatacatgtgccatgctggtgcgctgcacccactaacgtgtcatctagcattaggtatatctcccaatgctatccctcccccctcccccgaaagaagacatttatgcagccaaaaaacacatgaagaaatgctcatcatctttgacaactcttttaaccaaggtgtctgacatgccatctctatgctcacatggtcagattgtgaaagcgaactatatgttatggccataggtgaggagaatttgaaattgcatgaacttttaggatatatgacaaaaatatgtatgttttcagatatgctttagctgactgatgttctattgctatgaagaaatttttacattgaaagctactgaaatgtactttaagagctttagttgacttttaaaatattttaatctttttatcagattaatttcaataaattattaaatcattttaaaattatttaattgccacagctgttggactacctctattatgagtttattagaatatgttaattgcagattatatattttttaaatataaataatattgaagaagaaagttatttttaacctcataataaatggtcatttcttggtctttactaattcacatttaaattaaaactgaatgtatataatatgagcacttgaggcattttaaattcattttaatgatctgttaatattctgtattaggttcagctttccctatacacatatttgtctgctgaatttattggaactgctaccatctacaccaccatacgcagagtaggaacagtattacagctaatgcacaccttaaaatattactactgggttattaatcctgctgacagtagtggcattacacctaaaggattaggtatgtataccacttccactgtatttacatttgcctatgattattctgtattctgagtactgttaaagtgagcagtgtacatgactatgaaatcactgaaatgttttctttcttatatagcaaactggcatattgagaattgtttgtggtaaagaagtttagggcttttcaatattaaattatttcggaataaaatcagttaaaaagcaacaatagtctttattttagcctgtatgcttttttttcattcaggaagatacattcataatattaaaaacagataaatgatattggttataactggtgtgttctagtacatcagttgctttcaacattttcagattgttaattttttatattttattccaaatttatcctttgttctgactataatggaaactaattcttcactgtgattttttttttgaaaatatagccagtttttctaattatacaaaaaatatagaaaataaaataatacagaagaaaaaatatatttatgacccaaaccccaagaataattactgatatgattttggcatgttttcttccagtgtttctcattgcatacatatataaaaatatttaaactttttaattatagattgagattttctcaatttttctatgttgttcttttctcagctcaatgtagtaatgtaaggggatgtaccatttacatcgtttctaaagttttgattctgtaaatgttagagcattctctcatttatatatgtgtttacctccatctttgatttgtttaaaattactgagaaaggggctaatgacaaatattttaaatttttttcaggaatgtcatattattttacagttttaccagtatatgttagagtacttccttttgcgtgctcacaatagcattgaatattatagttttataataatcccgttgataaggaaaaataacactttcctttttttttttttttttttttgagacggagtcttgctctgtcacccaggctggagtgcagtggtgctatctcagctcactgcaagctctgcctcccgggttcatgccgttctcctgcctcagcctcccgagtagctgggactacaggcgcctgccagcacgcccggctaatttttttatatttttagtggagacagggtttcaccgtgttagccaggatggtgttgatctcctgacctcgtgatacacctgactcggcctcccattttactattctaatatttatataagcttacttttatttctttttattaatggggctttagaagttatttatactcagatctgttgttttgtccttttatggcttcttccattgcttttaagttagtaatgcctaaaatttattggatttttctgccaagcactctacatgttaatttgtttaataatacatataatgtaattatagataaatagacatattcatatacatacataagactgcatctatatataactttgtttttgatattatcctcattttaaagattaggaaactggaagttggtacaaaccgaacagcaccaaaatttgaatcatatccatctgactcagagacctagttcttaaatgctacactatgatagagttttctctagtctaaacaaatcatatattcacacataataatttctgccttaaaatattaatttctaatttacagaaaagttacaaagttgcaagcattgcacaaagaattctcatatgtccctcaccagattctcaatattttacatcttatcactttagcctttactattctctcatgctctctttttatgtatatataaacacacctacagatatatacacattttttttctgattcgattggtaataaattgtagacatgatactctgtcacctctaaatactttattgtgtatttcctgaaaggtaaaggcactttgttaaataaccagaggacacccattaatatcaggaagttagcattaatatgatactatcatctaattcagagaccccattcaaatttcactaattacactaataatgtcctttctaggaaaaagaaaattattttgccctaagtctgttgaggatcgtatgttgtgcttagttgcattcttacttttaatgttcttcaatgtaggatagttttttagtatttccttgtctttcaggaccttgacatttttgaataatacagaccagttatttttttgaataaccttaaatttgaattttctgtttgttcatgatgattcaggttttttcatttttacaagaaataacacagaagtcatattgtatctgtctccttgtatcatgtcaaggaggcacatgatgttgagttgtccttttacaagtgatgttaactttaaacatttgattaaggtattatcttccaggtttcttcattacaaaatcactcctttctctttggtaattaataagtatttggtggagaaatacattgaaactatataaatagcctgttcttcaacaaagtttcacctacttgttttagtttgttgatgattcttactagattatctttattgtgatgactgacaaatgatattttctaagacattaattaagttggcatatctactgtaaggaagaacttgttttactcctccactcatctatctatctatctatctatctatctatctatctatctatctgtctgtctatcatcttttatatcagtatggactcatgtattcaatgtgttatatcaacagttagcatactttctttgcaaagggccagatagtgttttaggcttacggagccataaggtctctgttgcacatagtcagctctgacattgtattgcagaaataaccacagacagtatgtaaacgaataggtgtggcttgttctagtgaaacttacaaaaacaagtggcttcatggatttagtcctagggctgtggtttgtctgtctcctgggttgtatcattatttcgatgctcaagatttggccagtaggacccttcacatggattatgggacaaatgcccataagtttttaatactattttactttctgaaacaagatgtttctgacttgtcctacactttccttatcccgccctgaaattagccatttttccaggaagccctggtttgtttggtggatatggtttttagaaaccaagatgtggatgtgaggtgtgcttcttggtttttgaatgtcattgcttctacgtacttttagtggacagatctaggaaatgatgtttatatctatgtatataggtacatctcaactgatttatctgtattaaaaccatgagttcacagcagtaccttcaattccagtccaaagccacatggctcaacctagcctcaaactttttaaatttgccgctttcttcttcaatagtgagaaatcttgctcctattgtctttaatatatttatatattttcttattctactttataaaaccagtgttttgatacacacggcataaccttctcagctttaacattgctagtcatctgtaaccataccctcagatttgactctgaatggcccttgttgtctcctcagccccagttgtttctttggcactgccaccctcctgacctctactgtctccttggccctgaccctgaaagtccttccagactcacttggctctggctctgtaagaccctgggtatcaccagggcctctgctccctccatagaacccttgcccctgaggcctcactggctctagctacatcaaagagaaggaaaggaagagtaccagtacatatattttaaatgaaaatgacaggaaagtggaatcagcatttattttcctttatcatttaaattattattttactttaacattttaatactttgaaattaattttgttatatagtagaatgtaaggttctgacttgaagtatatacttttctaaatgacagcatttttcaataccattttaaacaaatgctttcttttaaggacactctaaagataatttgcactacactagctttcgtagaactattcatgtgtaggcactcgccttgagaagtaggatatttttgctttaactgtaacttaacacttttgtctcttaaattattattatatatagttaagtgtaaaagcattgagatatattaaaaatattataggtcaggtaatacatatttatggtagcaagtgaaatcatacaaaggtttataaataaaatgttactactctcccaggtagccaatgttaccagtcttgtatatctttctactgctttttctctgctcatacaaacatgagcttactcatgcatacatataggtgtttcaaagctttattttgaatacatcatgaacacaaagtggtataattacatatatcgatgtaatatataaacaagttataattataaatataaatataaaatgaaccttatttaaacatcactaagcctaagaaacagaatattaccaatgagcctgaatattctcatgcgtgttcacacctcttttctactccctgtcatagaaataactccgtcccaaattttacgttatttcttttctttacttgggtgcttattattttttactatgttttactcttgctatttatgtatgtattactaatttattgtttagcttctatagtttacataaatagtattatttggggatttgtttcttcattcaattttatattagataaatccgtttgtattttattttgcagaaatggatttatatcatgcacaaagcacacaaatatgtatatatttctttgcaacatgctgtttatattatgcagtatacaataaaaataattattgctaacatttgagtgcttgtgattaaaatgggcctggtactagtctaattcctttacatatgttgatctatttaatcctcacaagatgtcctatgacaagcagtattattattcttaccctaacaataaagaagaaaacaaacctaaggcacagagatgttataaaactggtccaattttattaattggtagcagaaatagaagaataaggaaattattactaagacggtatctgtctgttcttgaatggagtgtgggtgtggtcaggaaaagcaatgtggcacagagctgaggtctggagcatggtgagggctttggcatgcagggcaggatgggaccacaatcagttgttagatattcaggaattttatgagcaccttgttaaatcattggtagcttgaacttgaaatcagattattattaatatgatagaaatcagaagtacataaatgctcaaaatcaggacctcatccctccactctgcagataattcctttaccagcataccaatggttgacgggtttccctgtcaggctactgtcagtgttcaatttcttgaccaaagaagtgtttatacaggtgttcatttcatgataattcgttaagttgttcatgtatgttttctgtacattggcaatattttacaatgaaaagtttttttaaagtaataccaagtgtcaataggaggggaagagtactttgtgcatcttggtggcagtggggcaataaaaggtggagagcagtctgggaaatagggaagatatttcttttattataataggcgggatggattttttggataataacttgcttgcagatataataatcttcatgtaaatattaagtgaataagcagatgctatacattatacatgaagggattatgcttttaaaacttgtaaagcagtagataaatactggttgctacaagaaaggcttaatgttacaggatttttatgaatctagcttcattttttaaaagtattctgtattgtatattatgcatattagaatatattatattttcatttttattagtaattaaatattttgaaattactttaaaatttgtacgttatgatagaactgatatgcacattttaatattttatactcattttcacttattgacgcagcataaatgcccactataatatgtattttctgtatacaagtgacatagaagaaataggctgcaaaacaaataattgcaataaaacagagtgtcattttttctgtgctttgttaaataatgtgtggggtgaaaatggagagagtccttaaatgaagacaagtttaattgagagtggaagacatattgggaaacctattaatgtaataaaaacagaaaaaaaagcattaatataaatacttggggattatacatttataaatggatattaatatataacaactttttaaaaagttcttttttccacaaaatcagacattcagtaaataatttgaaattgtcaaaaatttgaaagttaatttttggatactcatatattattaaaattttatagcattaatataaatattgtaattttaataaagataattattcaagaatgccatagtatcccaagataattgcatttagctaatttaatatcttgtattttttattttacttttttttctgttttgttctagatggtccccggccatcacaaaaagaaattatatcactgagggcatttatgctactttttctgaaacagctgatactaaaggtaaaataattttatataatttaaaataatagtatattaggtagaaaggaatttctggcatgttttaaaattattaaattagtaatagctacctttaattcatgaattgctttcaaaattctccacatcttagtattcacttttattgaacttaactaacttctgattaaatgctctctgaaatcttccctattaagggatgtgacagaaatggacaaggaacatatgaataagaattgagcccttattcttatagtaattgaccattattcgagaaaatgatctgtgtgccagtttaataaggcttacataatgtattttattgtagtagaattttttaaatgttaagatgaaaccaaagtgaaaataaatataaattgtgagatagtacacaaaaattgatactgtatagtcttgcatttatattgttttaaggaaagagtaagtgattagaaaatagtcataagaatacttagatggtcaaaatatgctaactttttatagtgaatgtcaatcaaatactaatgacttttaaaaattgatataattttctaaatatttacttaacttgaaataatacagtctataaattgtgaaatgtgtggggattttaattaaaatatcactacattaaactaactcttattttcttttacaatgattattttgacatcttttttaaattaaaattttaattttagatgtaaagtaataaaatattttttaaaaattaggatcgaggggtcaaggaagatgaacttcagagtatattaaattacctacttacgatgcatgaggtaggacatgttatgggccttttattttaattatttaagccaatctttagagtaaaattttaaatcaacattggtgatttatgcaggatgaaaatattcatgatgtgctacagttactggtggctttaatgtcggaacacccagcctcaatgataccagcatttgatcaaagaaatggaataaggtatgattataatattagtattactattagactttaatggagcacagttgttcctcctagaataactgctattctatgaatatttgaataaatatagcaaagtcttgcacataagagaataaatggagaatgctgctattgatcctcgaatactcaggaaactgatgaagtgtataaacagtagtctcaggaatcaagaagagtaattaaattgtatttgctatagtaaggacattacaaattgtgaatagagcatttttttttccaagaagacacgaaaaagcaaggcacattttaccaaaagaggatacaatgaaattttatgatatgaggcccgagagagattatagccagatttggaaggttcatagaatggtaataactttagtggtttttttctttcagctggtgatgaaaattaaagaattttgagtaggggaaatgttgtgctcagattgctattttgttagatttacaatcaccagtgtgaaacatgagttgaaggacaaactgatgtagcaatatcagcagggagattattttattcatcagtattaaagatgatgacttgagacagtggcagtgcaatggaaataatagagatgaaagatgttttggaataacaggccaaagccaaaagaaactgaaaaccaacttttgttgtggcaattgaaatgtaacttggtagataggtgaaatataatttcttaattagtatttttatgaacttaaccctatcatttagctttttaaggaattcttcgtttttatttttctggagttttaattagtgggatgagcaggatatcgaggttatgccatgtataactcagtgaatttccacagttttattgtgaaaaagagtttggaaataatatatcagtgactgtcaagggcttttttaagtgccttttttacttggccatttatatcaatgaataacaactttctagacttgaagaactccttttcaaattagagaagcaatcactatctctttatgcatatctcagttgtgatatgagtattacctttgagtttataattcatagggctgccaatctatttgaagaagattatacatttagtgattaacaactgttacaatttttttttctttttgagacagagtcttgctctgtcgcccaggctggagtgcagtgtgcagtggcgcaatctcagctcactgcaagctccacttcccgggttcacgccattctcctgcctcagcctcctgagtagctgggactacaggcgcctgccacaatgcccggctaattttttgtattttgttttagtagagacggggtttcaccatgttagccaggatggtctccatctcctgaccttgtgatctgcctgccttggtctcccaaagtgctgggattacaggcgtaagccaccgtgcccagcctataattttttactctagagtttgagctatatgaaactgttgatacttaactgattttacaaaataatgacaatttcatatagctcaatctaataatgtagtacaattactctcactcttctgaacttatatttagattgaataattagtgtccttgtccttagattttgctttgtttattatattacttgataaatttagtgaatcagttgaagatatccacattactcttgtagaagataccaaacttagattgtctagtatgatgaaatgcagaaatataattgtattattttgacacatcggaaatatgatcctacaattgagagtgctatttggtaagacctttaggatttacatgtattttaaatgtatggtacgaaagaactaattaagcacaacagattaaaaggccttgtgctcatggctgaccatgagcagaacatgtcagattgttacccgtatgttaaaaacaatcacacagattaaaaaacggcctttccttgacacttcagcttttctacttcaaaaatgtggagaaagctggttcagaatagtataaaagatgaaaaaaataggcttattagatagaaaatattgaaagtggctaacgaatttatatgtctgttttctagaaaatagccattaaaggctaacagttgtatatgaagtattttgggaggaaaattctagtctgttgtaattcatacagttgaattcagtataacagttgaacaaaaagaatgaactcagtttaattctgatggtatgctaattgggcttaaggaagcccttgtaataacagaacactgaagtaagcagctaaaaatttgatgtttttatatctgggaaatttcaaagaaaggaatagacagctacctctcttatatagcttagaccatttgcttactgaatatagtgagcttaagcagatgtattaggattattgttatttagtaataatgtatattacaagtaaacattaattaacaaagtaaatttcttattcatactgtatcacatccctaggtatgtagatgtgtgatggacctagacattttcatgtttcaacattagtcataatttctcttgacccagggtggggtctaataccttttttcctgctactcgaagttattcctagacaatagaaactctgtgagaacttccagttctatatttgagtgtagccacatttttagactgtgagggttttttttaattttttaatttttttttagagtctcgctctgttgtctaggctggagtgcagtggtaccatctcggcttatggcagcctccacctcctgggttcaagcaattctcatgccttagcttcccaagtaactggcactacaggcatgtgccaccacacctgactaattttttttgtattttggtagagacagggtttcaccatgttgcccaggctgctcttgaacttctgcgctcaggcagtctgcccaccttgacctcctaaagtgttaggattacaggcatgagccaccatgcctggcccagactgtgagcttttactttggttctcaagactatttttgctgtttagtgttgcttcttatgatttcttgaatgtgttttttttttttgacatgtctgactttgctattctcagacttgtcttttttcattactgatcttggttcctaaaagttttgaaaatggatttcagtgtaaacccatacatatttatgaatgtgggatttgaaaaaaaaatcttccaaaggaaataatcacttttctcatagtttattctttaatagatgaaatgcaaagcataaaagaaaaaaagagaaaaagaagcagtatcaataacatcttttcttttttaatagtataagctcttggcaaaactaaaaataatgactttaagctatttgttcccctttgtatcactgaaactatgaaaattatattgcatcttttactagattctcttgttcagctgagtactttacctcaaaatatgccatggcattttattttttcagaaacatatttaataaaataaagcacactataatgttacagcccctaaagaaccttcttgtattctagaatttgttgccagtgtatatagttgtcattgtcccttctactttatggaaacaaattactttttttaatagaaaaaatggaataaaatttctaaacacttaaacaaatgttataatgaatatggccctacttttatatagtacttgaagtgattgtataggttaagttgtatattagtggaggctattttgctccaagtaacagaaaacctctaaagcttttaaagtaaaaactgaacaatatacttgttaaaaaaaaccttaccaaaggattataaatcatgctgctgtaaagacacatgcacacgtatgtttattgtggcactattcacaatagcaaagacttggaaccaaaccaaatgtccaacaatgacagactggattaagaaaatgtggcacatatacaccatggaatactatgcagccataaaaaatgatgagttcatgtcctttgtagggacatggatgaagctggaaaccatcattctcagcaaactaccgctaggacaaaaaaccaaataccacatgttctcactcataggtgggaattgaacaatgagaacacttggacacaggaaggggaacatcacacaccggggcctgttgtggggtcgggggaggggggagggatagcattaggagatatacctaatgtaaatgatgagttaaggggtgcagcacaccaacatggcacatgtatacatacgtaacaaacctgcacgttgtacacatgtaccctagaacttaaagtatataaaacaaaatcttagagtaggaaccaggaattgtagggctgttaggaaacaagtttgctttatctactgctttctgtaagctgtttaatccttccttctgtatgttgactagcctttctgaacagaaacaaaacgttactgttctagtttctattttaaacagtttttgaattcaagagcccagcaaagaggagatattgtttcttagacctcattccaaattctcaaaaaggagaaagaactaggcaggtgcctacctatcatctaattagttataccaagaaaacagggttagggtgcaggtggctcacgcctgtaattccagcactttgggaggccgaggtggtcgaatcgtttaaactcaggagttccagactagcctggtcaatttggcaaaacctcacctctatattaaaattaagaaaaaagattttaaaaaagaaaatagggttatcaagtttaaatattggggccaattcttagagagaagacatgtggcctaactaagcatgtgttagtatgttgggaggcagtacttatgaacaccagtcacattgcccttttgagtgtatggctgaaggactgtttaaagaaaaattattaaagcatgctagtttttaatttttccaaagaattataatcctgagaagaaaatcttcagagttttatatttcacatatgtataatttatctgtaaagcatgtagtgtgtttttgtttttaatattagtaagtttttaaaagataatttatatattttgtagggtgatctacaaattattggcttctaaaagtgaaagtatttgggttcaagctttgaaggttctgggatactttctgaagcatttaggtcacaagtaagttgatatttgtcataatgcattctagaaataactattgagattatgtttttatgagttttctatgtaatgtagcatgaaatttgacttgaaaaatctaacagcggaaaataatagctttctgtggtagaaattgtaaaaatgttttataaaatatattttattaatagtagattgtgaaacaaaattacaatttaagtaattagtttatttctatattcttcctgaaaagaaagcattatctattctgaagatgtaataaaatattttgtcaagataaaatgatgcacatataggtatgatttcaaggaaagctttcttgacaaggaaatactgtgtatatgctgaggtctttctcagagttgatcttatgcttacatgctgagtcagtatttgttattagtttctaacagtagggcttattgattaattttgtgacttaaagatgctagaatacctcatttctttccccaaatcaagaatttgaatactttctaagaacactttttgtgtaagaaactgctgctggcttaatgattgcaattcatgctacactatccagtgtaggaatgttttaagagtatattttccttacaaatgaagccaaggaagtagtgcaactataatttaaatgttactagatgaggttcctatcagaacctcattttcgcccttgtttttttttttttttggtgcttacttaaatttgcaaagcgcttatttgtaataatcatgaaaactgcacaaaattcagacaagacatgtctaacaagctgtatagcctagaagtttaaatatttttaaaatttcggtaccaaagaataattaagtaagggagactagatatactatggatatggatataaggaatagttcaaacaaagccaggattgtagaaaaggatatatatgtgtgtgtatacacacacacacacacacacacggatatatatacacacatatatggatatatatatacatacacatatatatggatatatatatacatacacatatatggatatatatacacatacatatatatggatatacatacacacacatatatggatatacacacacatatatgtggatatatatacacatgtatggatatatatacacacatatatgtatggatatatatacacatatgtatggatatatacacacatatgtatggatatatatacacacatatatggatatatacacacatatatggatatatatacacacacatatggatatatatatatatggtatatggaactgtaagtacacttggtgacagagtgctgggagtgaagaagcatatgccctttttatattaagagataaagatcacttctttaacttcagttaattaaaataaactgactggagaaagttaaaggattgtagcccaagatgcagcctcctaaaaatgtcaagaaagcacattaaaaaatttacgaaaagatgaaaactcagttaatacaaaattaaaaataacaagcaggcagtttcctgtataaagatgctgtttgagatagcctattttccccctttttcctgtaaaatgtataaatgatacaacaagaagtaaaaaatgtactctctatcacaaatgttatcacaagtagaagatagatgcaaaatatgaactccagaatacgggtatcagctgcttaaagttgctcaggttgggtaaaagctgttaaggctaaagagaagataaaatgcaaagagaatggtgagagagttcacttatagcaaataggaagtgtcagtgaaagtagagtttctgaagatgagaggcacaccttaaattacaaaaatagatcatttgtttgaaataatagatatacatatatcatgcctgatagcagagttttatttgaatcagattggtttcagaaaaggagaagatatatcacaaagaattacacagatgagctgtatttgtggcaagcagtctatctctgtggctatagagaaaggaaagtttgtggattgtgaaagcaaaaggttacccttgtcccttcttttacacatatgcatggaagtgtcctgcagacagatggtccacgtaaattagactgcatcaaaagaattggcacatcatcagtgcaggtgaatcagataaaaaacatggaaaaaataagttaaagtaaccagtacatgaatagcacttagcagaaaaatattgctatggaatacatagcattttgatttaaaaatttcataagttaaaaataaacaaatgcatacatacatacatacatacatacatacatacatagcttctgagaaagaaccactaaacagaatttggagaagtaatccagctactccggaggcttacgcaggaggattgcttgagcccaggagtttgagtccagcctgggcaatgtagcaagatccatatctggaaaaaaaaaatgttgtaagaaatgttaacatagtgatatggtttggttgtgtccccccacctaaaatctcatcttgacttgtaatcctcacctgtaaagggtgggaccaggtagacataattggatcatgggggcagttcccccctgctgttcttgtaatagtgagtcgcatgagatctgatggttttgtaagcatttggcatttcccctgctttccctcactccatcttcctgccctgtgaagaaggtgcctacttctccttgccttccaccatgattgtaagtttcctgaggcctccccagcaatgcagaactgtgagtcaattaaacctctttcctttataaattagccaatcttgggtatttcttcatagcagcatgagaatggactaacacagatagcatggaagtatttaattatgagttaataaaatattggacaaatactggaagaaaataactatacacaaaaaaataaaattggaaattgctcaaaggcaaaactctggctagtagcatagtgaaatacacagaagataaaactgaaaaaaaagcaaatattatgaatagatgaaaatatgagtttaggattagaaagaaaatgagcgacatgggagaaaaacaaattaccataatggcataaattggccaggtgtgctggctcatgcctgtaatcccagcactttgggaggccgaggtgggcagatcaacgaggtcagcagtttgagaccagcctggccaacatggtgaaacaccatctctactaaaaatacaaaaattagccgggcatggtggcaggtgcctgtcatcccagctactcgggaggctgaggcaggagaattgcttcaacccgggaggtggaggttgcaatgagctgagaccgtgccattgcattccagagcctgggaagcagagggagactccatctcaaaaaaaaaaaaaaaagccaaaataataataatggcataaatggagttcccaaataagaaaagcagaataatggaacaaaacgaatatttaaatctataattcagtgaagtctagatgtaagattttgccatttttatttagaggacatattgtttgccagggaaaactgacctagaatggttagcatcaaagtgcattactggacttaaatagaagaatactttgtataatagtgcacaaataaggagaaaaatgagtctggctttagactctaaaataaccttcaatacaaaaaactataacaatcataattaaatgaagaaagtgggagccaaactatcctttaagtaaaaaggatgctgtcaaatattttttagccatacagcaaattatttctgtgactaaatcttgaggaaattgtggggaataaagtccaaccaactaggaatgactggagaaactattgctaaggaccgctggtgagcactgaataaatttaaccataaaactaagactaaaataaatgttcatattactgtgacagaccagaatttactttttatatatgctaataatgtacaaatgacacaaccgtaatgaattgggaggggactgagaaaagaaggaaagtagagcaagtgcaaagagtcagaatttccatgtaagtggacagatgaaatattacaaatataggcctattgactaaaatttgatgatgtagatgaaaggaaaaaattaagagtaaatatgctgacatttacatttctcatagtagggaaataccctttttaaacagatggaggattacttattctttcacagttaaaaagataagcagttctataaaattataaagctttcaaaatatttaagatctgtatggataaaactaagaacaatgtatgtaatggaactttgaaaaatccgtaaagatcagtaagcataacataaaatatgaaatatctaagaccagtcttactgtcattaaaaaaaaatgtaaaagcttttataaatcagctgttgtaagaaaaatatcacaattgatcacagtaatgaaacccagttctgtatgcaagaaacatacccaaaaaccaaagtggttttgaaaggttgaaagtaaaaggatgagtaaagttttattatataagtacaaagaaagcagaaaggggtggggggaggggggagggatggcattgggagatacacctaatgcgagatgatgagttagtgggtgcagcgcaccagcatggcacatgtatacctacgtaactaacctgcacattgtgcacatgtaccctaaaacttaaagtataataataaaaaaaaaaagcagaaagtaggaaccatgatcttagtattggacaaattagaatacaagccaaaaagcaataaccattagataaagaagaattctttataatgataaaatagaaacattcataaactagaaattacaggagaaacagacagtcacttaaagtttaagacttcagaacgaactttaattcacctatttcagtccacaaaaagccaagaagatctgaaatgggataaatctttttgaccttaaacttgtgggtcggtgtgtaggaagattggagtgctatcatgctggctccaggggctcatggtgcaggacttatagcttgctaagttttatactacaagtcagtaagtttaaagggtgctctgcctgacactacctgcagggatctcatcatttaaaattcacagccatgagatttgaccttgactctgtgggtagtgaaaaatagcaactcatctaaaggggcctactagccagaggcaggatgagagaatcatcaaactgtgtacccagtgaagtaaaactatggtggaggctgttgtggaacatctgaatttcatttatacaaagagattttgagattcaaatagagcaccaatgataatattctgctcttttagctgatgattttttaacccttcaccctacttaatggaagatctgaaagcatggatgaaaaatagagagtgagagaaaagataaagccttagaaaataagagacttcacatgtggctattaagagttcaaaaccaaacaccacatgttctcactcataggtaggaattgaacaatgtgtgtgatgtttctccttaaacatggggggaggggggagggatagcattaggagatatacctaatgttaaatgatgagttaatgggtgcagcacaccaacatggcatatgtatacatatgtaacaaacctgcatgttgtgtacatgtaccctaaaacttaaagtataataaaagaaagagttcttagaaaagtgatgagtgtaaaaactagatatcctgaaacactttgatctactaaaaacttagaaatgttagataaaaatatgtcaaaaatcctattaaatatataggtgtgcacacaaaagtaagggaaattctcacattccagaaatgaaaatcaagcatactaaaagaaacaagactttaaaaacaaggtaatttaaaaataaaccatgtaattaaaaaaaccctaagtaacttgtgaaaatgtaaaggtagtaattacaatgaacacctatatggaaacattaaacagattagacaaagcttcacaaagaattggtgaactgagggatagaactgaagaaattacctagaaatcaacaccaataagcaagattacaaccatgacattaagagagggggaaaaaaggaaaggtttcaaatatggctaataagagttatagaaaaggggaagagagaatgaggaagaggcaatattcaaagtaaattactaaagttttacaaaattgatgaaagacctgatttctcagattttggaagtaaaatgaattctaatcagggaaaattagtatgaaatcttaccacaaagtgaaactccagaacccaacaaggacaaggagaacaacaaagggaagttagccatataatattaaaagaaatataatattttagtaaagaaaacaatatagtacatatttgtgaataaacagcaaagtgcagtccatagattgacccaaatacttagtgattttagtgctaataaaggtgccatctctgatgaatagagtgatgatttacttttaaaaaatgctgtctgttaaaggaatggaacaaatgatatatttttatttgcatttaaaaagttaataggcagttataacaaatgtaccactctggtgagggatgttgacagtggggaaagctgtgtatatgtaggggtagggacatatgggactccctacattctgctcaattttactgagaacctaaaactgctctaaaaataaagtgcatttaaaagagaagggtaaagtggtagggaaatgagaaattataaagtgttcacttgtatgggggagctgtgagtgatgtggaaatgtaaaggatgagttgggtgtaaaatctctatgtatttttttatgtcatatatttttaactaggtaagtgtattacttattctaaaaattaaatgataaaagctgttattgcattatttaaatatataaaaataaactttaaggcaaaaaatttaatgaggatgaagggggccaccatgttatgaaaaaggtgtaattcactaggaatgtaaaagtttcaaatgcgtatacacttagtgtaggtgagtcgtagaaatctattattgactaaatttggaagagtattttacaaattttaacatatttttttccttagaagatcaattacaaaaaatctcaaaagtataatttgaaaaaaaaaatccattggcttgagtgtcatacacgttcttttcaaacacacaaaactatagaaattatttaaatgagaccataaagtaggctcaagaaatttaaacaaattgtcatacagatgactttctctgcaaacagtgcaattaaacaagaaatcaatgacaaaaattaaacttagaaaatagaaatatatatatcttctaaataactataacaagaagttattcattatacaaattataaaatgcagtaaaaatatttaaaattatgtatatttacacttgtgagatttggtctaaatgatactagagaaaattcatagttgtgaatatttatattaaaagcagaaaggtacttaggttttcatttttctaggttctcggttatgcttacctcattaattgtcagcctaagaaggcaaaagaaatagtaaagggcagaagtgaatgaaacagaaagcaagactattaaacagagtaacggcaaggccaaaaagccgtattattcacttataaaatacttttccatgactagctaaagaaggaatcggccactatttcacctaatataattcatacaaccatgataccaaaattggatatggattatccaattataagggaaatttatggtcaatctcccctatgaacatgagtctatcagttacttttttaaaagtatacagcataaccaaattgagggtagtcatagaatgtaaaggtggtttaacatcaggacaacatttcatctatttattaacaaaggagaatagctatataattatgatgtgtgcaaaaaattttcataaaattcagtatcatttgtcataaaaatttttagcaaaccacaaatagaaaataatttattcaatctggtaacatatgtctactgaaaactttccacagtcctatttagtaatgaaatgttagaagcatcccctttgaaaaactaacaattaacaaaagcctgctttcaccacccctgtttgacatcctattgggtaatattttggcatttatgaaacactccacttaaagctagcaaaattgttttcaagtgcatatgcagcattctccaaaaggtattatgagttggggtgtaaaatataaaacaagtctcagtaaatttaaaaactaataaatcaaacagagtgtattatctgaccacacagaattaaatttgaatgaaagaggtttgagaaattgcaaggtatttggaagtaaagaacgtaactaatccctgagtcaaaaaagaaatcataaagaacattagacgttagttagaactgaacgaaaacaaaaccacagcatagactacttactgaatgcttatgcattgctgatggaatgtagaatcctgcagccatgttccaaaaggatttcctaatttcttaaaaagtattaccatacttaggaatgtatccaaaagaagtgatagcatgttcatagccagacttcgcatgaatgttcttagtactattattactattattattattttgagatggagtctcactctattacccaggctggagtatagtggcacgatctccgctcactgaaacctctgcttcccatgttcaagcgattcttctgcctaagcctcccacgtagccaggactacaggtgcgtgccaccatgcccagctaatttttttgtatatttagtggagatggggtttcactatgttggtcaggctggtctcaaactcctgacctcagatgatctgcccaccccagcctcccaaagtgctgggattacaggcgtgagccactgtgcccagccagtactattattaatagtagctccaaactagaaacaatccaaaagtcaatcagctgatgaatggacaaacaaaatgttttatgtctatacaatggaatactattgtgcaattaaaagggaacaaactactgatgcatgctatgacataatgagtcctaaaactattatgctaagtgaaagaagccagatgcaaaaactatatactatatgcttctgtttatatgaaatgtccagaatgcaaataagtggttaaatggggctagcaatgggagtgggaattaactgccagtgggcacagggaactgttgaggatgataaaaatgacctataactatattgtaatgatagtggcatgactctatataatttttaaatgaattgttcatttgcaaaatgtgtgaattttgtggtatgtgtattatagttcagtaaagctagtaaaaatgtgaaaaacaaaatttaaaactctttggaagtgcaggataatagtattatcaccttggattaaggaaggatttctaaaacaataaatacacataaatcatacagcaaaaagataaatttgaccattagaataaaaagtactttaaaagataccataaaaagtgaaaagacaaggcacaaagtgaaagaagatatttgcagtttatctaggatacagtggatttgtatcctaaacatacgaaaaaaattgtgcaaataaattagaaaaagaaaatctgttaggatcatgaagaatataaacagacaattcactgaagaggaaacttgagttagcagtaaacatatgggtgatatactcaacttcagtagtaatcaagaaaatgcaaataaaacatgcatttaatgcttatcaggatggtaaattttaaaactgttgacagtatcaagtgttgacaaaggatgtacatcagtggtaactctccagtcactggtggaattatatactggtacaatcacattgaagaacaatttacaatttttgaaaaagataaatatacttatactctatgactaaggaactctctccttgacatagagaaagtctcatgtgtgtgaacagtgttcaatataacattgctaatattaaaagttggaaacaacatagaataggagaacagataaataaactaaggtatattcatacagttggatatattcagaactgaaaatgaatgaagtaaagttaccttgcacaaatcaaatataaagcagtaaagcaagttgcagaaggatacataataatgatgcaatttatttcaatttcaaaaatacgtgaagacaaaattgtaaattgcgtatgaatagatattcatctaattaaaagtataaagacgtacatgggaataaaaaacaaaatttatgattattggttatcccgaagtagagtgtgaagaatgggatgatggacaggtatccagaaatacttactaagttggttggtggttacatgaatatttattatgtttaaaaaaaaaactgagtaaagaaacgtatagcaaacaaaagtaaagcagaaatttattatcactgtaaaaatcagatgggatttgaaagcccaaaacacaatgagttgaacctgaggttaaaagttcaaaagagaatgtggaaggacattctgtattttgaaaggaataatttaagtagatggtgttaagttcataaacctgaaaacatcaaatagcgatgtcaaaaatataaagcaaaattcatttgagatgcaaaagaacttgataaaatagaataatggtagagatgacatatctctctcagaatgggaccaattgataatacatacagatatagagaaattgagtaatagattcataaaacttggctcaacagatatatgttcaatcttacatattttgaggatatacttcatggctaaagaagatatacaaaaaaaaaaggcgggtcatgtcctgggccatcaaatgaacaaagcagacagagtagacattttattggacactgcctcctgaccataatgtgataaaattggaaataaaaaaagaaattatgcaaaaatatcttacctacttagaaattaagaagcagtgtgaagatatcctttagagaatagaagaaaataaaagaaaaattagaaattatctaaaattttctgtacttcatagcaaaaactcttatcagaaataaatacctccattactgaaaaataaagattaaagttagaagaactttgtacttatattacaacattaattaaagtacaataaagtaaagtaggaagtacaaattagtaagggtggaggctaacatgaagaaacgagaaaaataaaaacgaactgttgaaaggatcactaactacaaagctgatgtttttaaggaaccaacaaaatgaatcaaactttcccatacctcattgagataaaatagaagcttttgaataaggaaagccttttcaaattataggacagattataataattataagaaaaatatagtacattataatgacatataagaggtccacttctaattcttggtaatatcattttctatatattttatgtgttcattcattcggtttttcccacatatacatagtacttttccatcaattaaaaaatgggaagggtaatatccagtcattaataaataaaataaaactacaggagcacaaaacatgccctgttttgcttcactagtaatcaccaacaaacctatcgtatgctcccttaatgcagaactgtgttttgatatagtttccgtgtaaacattggtgcatatagcattgagttcctataccttatcctccattctagcctcaaaataaaatgctggggagatgtaggttaaaatctgaaataatattacaactgtcctgatagattgaagaagatcagaaagtataataatatctactagttgagtaactactgcttcttactacagaataatatatacaatgatagccaaaggaaattggaaatgtaaatacaattataaattgcttcctgaaaaccattaaaaattaaaaatacagtaaatggagagctatgctgtgtacattaatgggaagactcaattatataaagataaaattgtaataaatcaatttgtaaacatgtcattctggtaaaaaatataatttttatttaaaggttaaaaaaactcttcaaaagctaactcagatgaacaaataagtaaaaatgtcaatagaagtttgaagaataagaataatgagtatttattgtaataagtctagtggactttatatcaaggaataaacttaaagaaggggtgtagaatagaaagcacagaaacacatcctgatatacgtgtatatctatatatatatatgtatgcttagatactagaaacataattaaaatatgaattattcaataattggcagtgggaaattatttaacttctggattgaaggtggagaagaagccttcaaaccatatcaccacacccagccccctcccccctcaaaaaaaagaaaaccaaaaccacaaacattttacaaagaataaacatttggaattgtggacttccagatcaagttgataaagagagatgaaagaatatcccttgtcccaacctaatgaaataaacattatatagtaaagtagagactctccccctccaaaacaacaaattcaaatgtaaccagacaaggaaagcagcatcacataaagcaatgcatgcaaaatattgacagcgaaaaaaaagaacccagagattctggagtgacttcgtaagtatccttccctcatttctatccctacaaagccaacggaattcctagatttctcccttaataatccccacattagagtgataggaattgattagatatacctggtttttcttctttaggacttttggtgagtgaaaatagttcttttttgaaacaaggagaatgaactgagattgatgttctgtgatgaaaatgggattccaagtttttgtattaacttatcacactgagggatcaagtcaaggcctgaaacaatttccttttggaaatgagatatagtcccttaagtaatgtatggaaaaagcacaccatcttctaggaaaatttgacagagaatgataacactaagatatatagtatttaaataaaagtttagtgattaaaaaagagagttcctaaaaagaaaatggaaaacctaggcaaaaaagaagtactttcaaatggttaaacatttggctggcctcagacttctcccagttgaattcagtgccaaaagaaataatgcagtgtctgcaagttctgaaagaaggtgtgacccgagaatattatatcctgccagattgttaagtatgtagacatcaggtcagaattcagaagacagacttcttcatctcctcttgaatggcatccccagtcaattgagagctgagtcaaaagaaaaaccacaaatggtaaagacaaggtcaaggaagtgaattcatttgaagtagacgaagacccaacaattcatacataacagcagtgttacaatgaaaataatttaagtgttttaaaccttgatgttcaaatagcaatatagctcacaaaaactagatgacataaagtgtgaggatggtaattatctgtctttaatataaaagagtaaattgatactttctaaaattgaaatgtttagttaattatgtaacactttgttgttttattcataattattttttaagcctcatagagatttttaattagaaaaaagccctttggccgggcacggtggctcatgcctgcaatcccagcactttgggaggctgagatgggtggatcccttggtcaggagatcgagaccatcctggctaacacggtgaaaccccgtctctactaaaaatacaaacaattagctgggtgtggtggcgggtgcctgtagtcccagctactggggagactgaggcaggagaatggcccgaatgcaggaggcggagcttgcagtaagccaagatcacgccactgcactccagcctgggcgactgagcaacacacagtctccaaaaaaaaaaaaagcccttcatgtggtaaagaaagtcatctgaagttttaaaaatttttttattgtttcatgcccttttctttattttctgttaaatgtgagtaaaattacatttgatgctttttatttaaaataaaatttagtatgagtttcttctatccttctttattccctctttcttcccttctcctttattaccttctcttactctccataaaaagatatctaatgtttattgttatttattgtgttacttttgggtagtagaattttaagtcttgtactttctgtttccctacagtttatgaatttctatgttgtatatgatttaacacaaccaattaaataattatgaaaaatgagttaaaataaaaatcattttaaaatgctatagtagaaagaatgagtattaagtataaatgaagaaatgacaggatgaaaacttgatagattttattcaagaaaattaaaaaaaacctttgatgccacaaaatcccttgaaattcagaaagtggaaaatatttgtaaatgagttgacaaaggaataattttcctgatattattaggaatctcataattagtagaaaaaagatgaacacacagaaggaaaaaatgggtcacaggacagtatcaggaagttcttggaagtagtataaatggttagaaagtttcaattgatcagcaattcttgtcaatgaaaataagatctactttttacataccaaattgactatttttctgattattataatacatagggttggtaaaatgcatttataccttaatagtagaaatataaatgtacatatttttggaggtcagttcagcaaagtctcataaaaattaaaatataaaagcttttaacccaatcatttcagtttttatcctaaggaaataaccatggttatgcccaaaaatgtgtctaaaggaaaagtttatttatggtagaaaaaaattggaaattacataaatggctaacattagttaatggataaaacaattatgctactttttttttttttttttcgagatggagttttgctctgtcgcccagcttggagtgcaatgatgcaatctccacccactgcaacctacacctcccatgttcaagtgattctcctgccttggcctccagagtagctgggattacaggcgcctgtcaccatgcccggctaatttttgtgtttctggtagagacaggatttcaccatgttggccaggctggtcttgaactcctgacctcaagtgatcctcccacctcagcctcccaaagtgctagaattacaggtgtgagccactgcgctcggccaattatgctccatttttcttatcagttatattttatgacactgaaaaatacacaatatattgttgacttaaacaaactataaattaccttatatagaacaatttccattgtattcctctcatcctgtcatttatatctgtgtgtcatatatggatttatatgcatagtaattaatctgtatataaaatgatatttataatgattatgtctgggttgaagaattatggggtttcttttctttctttattgttttctttactgttttcatatatactctgaatttgttacaagaaatatctttttttttttttttttttttgagacagagcctaactctgttgcccaggctggagtgcagtgatgcaatctcagctcactgcaacctccgcctcccatgctcaattgactctcccacctcagcctcccaagtagctgggactataggtgcatgccaccacacctagctaatttttgtatttttagtgtagatggggtttcaccatgttggccatgctggtcttgaactcctgacctcaagtgatccgcctgcctcggcctcccaaagtgttgggattacaggcatgagccaccacacccagcaataagaagtatctttggccatcccacaaaaagattgttttgtgaagaaagaaatttaaatacatttcagtggaatgtatagtaagctaatacatctataatgtgcatgattacaagattctgtaaaaaaaaatagattacactgtcgatccatgtgggcagaaatcctgtcaaactcaagatataaagcaaatcagcactaaaaactgaggtctctagatcttaaaggtaattatgatgttagtttttccagtaaatgtcccactgaagcctttcctgaactaaacccacagagctaggtctttcattagaagtcctataaggaacaaaatcatgtgatgtacagggccagtgcaccatttcctgcctaagatgatggatggcgttttttttttttttttttttttttttttatctcttgactgctgtgcaacaaaatgtactggtaagtattgttttaaagaaaactacaggaggaagttgactcatctctactgtggtgtatgcacagcatcttcaagtttcccccgaacctagaattaagcatctgtataaacgtttgcattggaggagataatcaagagggcatggatttcttcggtagctgaagtagtagtggcacagttaagagaatattctaaatttcagatagcctacttaattaattagttcacttttttgagaccaggtctcactctgttgctcaggctagagtgcagtggcacaagctcactgcagccttgatctccaggaatcaagtcattctccccttcttgagtaactggggactataggagcctgccactatgcccagctaatttttttttttttttaagtagagatgaagtcttgctgtgttgcccaggcttatctcaaactcatgagttcaaatgagcctcctgccttggcctcccaaactgctgggattacaggcatgaggcactgagctggcctttagatagactaatttagacatatgtttaccagctccttgtagcagagatctatttcaaggccaatgctttgtcatttgttctttcctgattgggagcaaaggaacacttaaggcctccttttcttgggcgaggcttgagttggaagagatttaaaccttcccttccatagtcccataatactcattagccctgtattttttttaaatagccatttgacctttttcagtcatatttaagtgttttgcaaacacagctgcagaacagatgccctagcttccttttgagtttaggtcattttgctttttccttccctggactgaggcagatagggtgagggtatcaacaatcctgtgtcttttgttatggagtgtggctcttggaggctaatgttagaagagaccttttgcagatgaatggtacggacataaatggttcatttgatttctgtattaattatggtaacagtagctgccataactgataaataatgaaattctagtcacttaccaggctagtagtttatttcatgttcacttaaaatccaaataggttttcccaagcagttgattatcttacagtgatttagagacccaggcagcttctcccaccttgtagctccattgtcttccttctgtggattctgtgttgctggcttggggaaagagcatggaaaatgtgcatgagtgcttttcctgtgggtcaggactaaaaataatctacaacttttctcttcacattttattggctagaactcagttaaatagtcacacttagctataagagaggctggaaatgtaatacagatgtggaccaaggaagaaaggaaccagagtttagtgattactttgtcaggctgtgtcacagttgccaatccagagaacaatagaaaattgaagaaatgaaatactgagaattgggagagaagatgatccagattttgaattctttttttgtttttttgtttttttcttgagatggagtctcactcttgcccaggctggagtgcagtggctcgatctcggctcactgcaacctccacctcccaggtttaagcgattcttctgcctcagcctcctgagtagctgggactacaggcatgtgccaccacgcccagctaatttttgtatttttagtagagatggggtttcaccacattggccaggcttgtctcgaacttctgacctcgtgatccacccacctcagcctctgaaagtgctgggattacaggcgtgaaccactgttcccggcccagatcttgaattctaaggaagtgacacaaatgagaggcctgtagtaattcttgagctagagctaagagttccaggaggcctttaatggaaccttctatcctgagtatgggtgtgggagggacacaattaaatcaggcaacattaagtagaaagatattttttaaatccattggtagaccacaaatacaagcaatgatgaactctctttaattatgcagaattattttgttttatgacaccaaaattaagctagagtatttatttttaaccatagttttagttcttgatattaaggtttgttacagcctatgttataaactttgaatttgtacaggcatgatttaaaaattatgtggtctgtatgttaggggataccaataattttaacccaataaaataacttcaaaatagttatttgaaatttgaaaataataacaatgacatgtatgtaatattccataatttgtacatttcacattttagttcacacagatattttatttgaaaagtttttaactaatagtcttggaactttaggatacagttgtgttacaaactgttgtttctatagatggaagttcatgaaaataattacttgtattattctgtatctgcttataaattgttctctcttatctaaaagtcatgtgatcggagaatccaatgtgtttcatggtgttttatttttcctccttctctccaggagaaaagttgaaattatgcacacccatagtcttttcactcttcttggagaaaggctgatgttgcatacaaacactgtgactgtcaccacatacaacacactttatgaggtaaaaataaaaaatgtgtgatgaaagttttaagtgtatacagtggaaaccctcttaatctatgcaattgagatgagtagttggtctgttaatctaaaagctaattaaaccagaaaatggtttaatggtaaaaaatgaatatataccttatatttttattttattttaaaacatatccatgtacaatttttgccaatttctttatgtcgatccaagagcttttcttcttgtatgggttggctgactggcttcacacaaagtctttctcacataaactacatccgttatgtagtattagttctgcttccccatccccacccctctgtttttatcctctcgttcctactctctctctttctgcttctattagctatccactgccagtattaagctggagttgctactgggataaatttcggtaagaattatttgtaaaaatgatatctggaagcatctttggatctcatcatttcaatttagaggttccttttttatcacttccaacaaatgggacagttttgggttcagtattttctaggaaataggtatactacctcacagggtggctactttcatttttaaatgctagtaaaatgttagtaatgtccccttacattaaccttaactctgctttcctataactgatcttcagtggtcccagttctttttctctagcacaagagctaactgccagcatccatttttgtatggctctaagttaaggaagctttttatatttctaaatggttgaaaataatcaaaaaaagaataatatatgagttgtaaaatgtataggattttcaaatttcagcgaacacagtcacactcatttgtttagctgttgcgtgtagctgcttttgtgccacgaccgcagagttaaagagttgtaacaagaatatttgttatgctctcctcaccttgcactgttgcttggcaaactagaaattacggtgatgtaatacctcaacagtgtttcatgtaccacttgtattgccaaacctaagttttctgcttttaaataccagtgcatacccatcatgtcaaaacaagaaaagaaaagtggatttttaatctcacactttgaaatacagcagagtgtagattattttgttatagatttagatggcaaggccttgcgtctgttatacaagggcattatagtcatgctaagagaagacttacaggtactactaaatatccataatattattcctaactcagaagagcagtggtcagaaaacattaaacagaatatctcatcattgtagatttctttataaaaatgttttaaaaataaaaatgagagacattgagaaagggagatgctaagcttctgaatggaattgtactataattttgaattaacctgtaatctcagctacttgcggggctgaggcaggaggactgcttgatcccaggaggtctgctagatcccaggaggtcaaggctgcactgagctgagatcgcgccactgcactccagcctgagtgacaaagtgagaccctgtccccttcaaaaaaaaaaacaaaaaaaaaaacaaaaacaaatttacacttctctaatactgtttcttttcatgtaagccatggaacagatcaagtcaattgcagattttgcacagtcctcaaacaggataggttttacatttttaaatgatgggggaaaaagtgtattttgggatgtgttcaattatatgaaattcaaatttcggtctctgcaaataaaagtttttgtttctttgggttcttttaaggaaaagtacagagagttattgcaaagagaaaagtacacactcaggaaaggggagtgtgggtatacttaagagagagttgcatgcaagggtttttggggctgctacctttatgaatttcttctaaccaagggatggatggaatattcataaagattacagtaaaagggtagatatttcccagaactgtgatgctatctagttttactccaaatatgggtgttcctggaaccattatggtgctggtgagtgtgtgatttagtatgtcagtgagtgtataatgaggtcctaggtgaacctccatcaaatccagtgccatactgggtgcagttagccttagctatcttggctctcatcctggcttttcagggtcttgtcaacccctagtttctgaagctatttcaacagtttccttttgctagtcatgcgaaactgctgcctggagttttttgttctcctgcaaccacccttattattcctgtttcatttccccttccccttcagagatgtccatctcttattcttatgggctgatgagggagaaggtcggtcttctttatctacttcctgctgattagagatgttggccctgcctggcaagggtatggaaatctttggctgcctggcctgagggttctaagggtgagtcatcaggagactctgaatccaaagcagggattggaatcattgcatgaccatcattttgacatggaactgttgtaatgtaaaagacacaaaatttacaaggaggttaaacaagtaaggacaaagattcatagtaataagagagctattaaaggtcgaaggaaggaggaaccatgtcacagttggtaggtatcctttgatggagtcccagatggtttgagcagtgggattatattgaaattatgtagccaggtagcctgttagtaaatcttttgaactttcagttcaactaatcctgaattgttaatataagaacaacaggtgtggtttattactgtgcaaacccctctttgttcagccagaacataaagcctcttgttgtttccttgaccattcaagtagttcatgctttggcacggttagagcttcatacagtagcttagcaatgagcctaaatcatgggatcaaaatcttgcaaattcctgtcatacccaggaaagttttgagttgcttcttcggttgtagaggcctgacctttaagatagcttccttttgttcgatggacatggtgtagtttcttgggcttaggatgtaccccagatattttacttccagtttagaagtctgggccctgggtggagagactggataccctttctcccaggaagtttagaacttgaataacattcttatctgaggcctctttagtgggtctgcatacaaggatgtcatccacatattggcgtgtggcttccctttctggctctagttcccttaattctcttgccaaggcatttctgaacaagtgatggctatccctaaagcccggaggcagtacagcccaggtatactgccaggaaatactattttcaggattagttcgctcaaaagcaaacaaatagtgacagtcaaggcataaagggatacaaaagaaagcatctttaagatctaatatcattaaccaattggtgtcttctgatatttgggtaaatgtggtagaaggatttggcactttaggatgtaagggaattacagcctcattaatggttcataagccttgaactagacaatattcttcattttgtttttggacagggaggacaggactattacaaagagactgacatggaactgggaggccatgttttaaaaacttcttaattacaggttagagtcctcacctggcttcttgtttgaggagatattgatgcttatgtgggaaattatttttgtcttttaaagagatgatcactagctgaccatgtattactttcccaggagtttcttggtctcatacttgtggttccatttccagatcttactttggaaggaatcttctgtttgtctgatactggtatcgaaaaaacaagcattgccaatacttgaaagaaatgtttcccagggcctgataaacataaagtgactccaactgtggccaggaaatcccattccaataaagaaatgggacatagagttttgtagcctgcagctcaggggtaaggtaaagcgttttgattttggagtgtcatcaacatccatgacaatgcagttattggaagataaggtccaagagtggcctttaggacagagtaacttgcccctgtatcaattaaggaattaatattatttcctgccatgtcgagttacccaaagctccttagttgtgaggaccatgcttttgtgggagccgccaggaacgttgggtcccttcagtcctcagttataaccattatggcctcaagtttccttctctccctttggagctgagggcattcccttttccagtggccctcctgcttgtagtgaggacagggtctggttgggctcccttggctgggacaggtattgcgcctgtgtcacagctccccacacttgaagcagcaaccattacctttaagttttctggtaggtctgcttggtccatgggtgaagcatccctctgggtgactctgaggttgcaggatgctgcttatagtgactgctatcatttgggcctgctgctgtctcattgtttgccatgctaggtcctttcagcatattcagccctatctctattattgaataccacaaaagccacatcaagcatttgattaataggcatttgggatcccaaagccaatttctgtggttttcttctgatgtcaggtgctgactggctgataaagtgtgtcccgagtaaagtttggcaagcatcagtatgggggtcaatgttagtatattttcttagggcctccacaaggcatctctggaacaaagctgggttttcatcctttctttatttcccttattttatcatagtccacaggcttggtgttacattttttcattcccttcactaaacaagtcaccatatgatttctttttcttagatcaacttggccctgttgatagttccagttagggtcattgttaggcacagatgtggccctcataccatattcttcagagtccccagatgacagattgttagcataagcctgggcctctgcccaaatatgctgcttttcttcaggggtgcaacacatggacaagatgttatgaatatctccccaagttaactcaaatgagagtgagaaagcccagaattccttcatgaatttagttgaaaatcaaaggtacatgcacctgatgaatgatcccagcatccccattggctacctccctaagtggacataacttagaatggtcccttaggagggtaggaaacaccactgcaggtgaccccagcagggctcagttcccttggtagggaaggttatataggatgttaaggaggcggactagtaggagtctgggtgctggagacagtggaactaggagaagactgaggacttaaaggtggagctgggtaagagggagaagctgtgggtgccagactgtgtctgggtcaggaggtgagggaaggctctggattagttatttgatatttcctaattccaactaattagttgtttgatattttccaaaaggggatcatttaggatatctggttccccatttggttcccttaaaggaaagggtgtgagtataacagaggcaggaattcctacaaagctcagggttttgataaagagctatgaaggcctgtacatacaatatttgagtccatttcttctgatgttcacaaaaaacgatctaattacaagatggtattaaaatttagggtcctgttctttggctgttgcaccccattttctgaaagagagttacccttggctttgacttgttcttgggacaaccaactgccagtgattctaaaatgaggctgatgatgctccaggctggctcatcataaagataatactggtgggctgggcgaggtttccaaacactggtgggaccttgaccccagctggtgttcgggctcttgataataggagttcaaggatgagtcacaaaatagtgatagcatggagatttcttgcaaagagaaaagtacaaactcaagaaaggggagtgtgggtgtactcaagagaaagagttgcatgcaagggggtttaaggctgcttcctttatgcacaaataaagttttatagaacataactcattaagtaaagtccattggtcacttgacactacagagttgagtagttgtaatggagattatatgatccacaaatcttaaaatactatctgatcttatctataaaaagtttgttgaccactgctctacagcagcacagagaaatttaactcccctctgttgttctttttattacaagctgtattatagtcttctgtcagaattaatattcatcattgcaaaaacttggaaaatgtagaaaagcaccaaaataaaatttagcaaatactgattaatacttaagaatatatatatatatttctcaactcatacacatatgcacacagaacttttataaaatgttatcctaaatatagttttcttgtccagctttttgcacttataattacaaatatatttatcacaaaatatttatctatagctgggaaggcaaacttttctggtaaagggacagatagtaatatttcaggctttgtgggctatacagtatctgtcacaactactcaaatctgttgtagctcagaagcagccatagacagtatgaaccagacaggctgtgtaccagtaaaactgtattacagaaacaggtggcaggctagatttagcccacaggccatagttttctgacccctgctctataatattacttttaactacttaattttttctctattttatcagtaaatttaagagtggctgctctttagattagtgaggaaatctactgactgctctgaattgtttgtttgtttgtttctgagcttaatattccgactttgtgtcaatcattccacaaatcacaagattagtagactatgcctttctgaacaatgcctttttgaattatagtagtgttttaatattgtttcaatatttggcatgcagaactgaataagtactaacacaatggcttttccctatgcagagtataatgaggtcattttctttctttattctgatattgtatttccctcatcatagtaactgttttttattgggcacttcttatgacaaacatggtaaattctttatgtacattgtttcagatcttataactaccctatgataatggtattttttttgcttgtgaaaacagacaaactaagactcacaggttaaataatttgctgtatgtcatgccactaataaataatcataaaataggtaggttccatgatatatatacataatgcaaaaatgtcagaatctctcctcagttgacagcattaaaatcctcctctgaatcaaaacctgctacaatatcagattaggcttctgaaggctagtgcctaatattcatgaacacgtgtttatgttttgattttttggacctactaactggtttggtcaatgatgcctatgtaagtttttaatcattgttttacctatgtgaatttttgagcatctgcttattttgacctcttatccataatagagagtctgagtagtcagtgcaactttatattgagtgtagcataataacataatatgttgaatttgaaaaaccattgtgtagtactaacctttaaataagaaaatttcatatacatgtatacacacatatatgtatttctattagtcttcctgaaaagtgactcaacacaagtacagcagcgtttttacccaccacctatactcctgtgtatacctagtatccagattttggtctctggtgatattctacacaaaacaaagccaactaattgctggtcctgtgtcttagatgaggaaaactcaagataagtttgaattctctgatactggatgtgggatgaggcagagctcctgaaatgatgaaggaaccaacttacagacctctgaccaattttagtaataatacttgtttttaaaatagaataatgtttatggttactttaaataattttttcaaggactttgagtttataatgaatgcatattctaaaaagaaaagttaatgtaagtgtacaaaatgccaaaagagagagatgataaatgattggttatcattgttaatcctacaaaatagcagaaagagtcttcaacataagctttaatactatggccaaaccaaattttattatcagaatgacagggcagtggattactgtttctggatcaccagagtttaaacatcacatcttttgctgtgtcgcatctagttgcaaaaagattaacttgtgtgatgggtatcaatttaatttttgttaacatagtaaaggaaatttaactgaaaaaggaaatcgcttccagactctctgcttaggtttaattcatcttgttagcatcaaccaggttgtgtactcttagcaagaattagttgtttgataatccagagtttgaaatgtttttttaatcttcattttcttttttctgtttggggaaatcaccttaatctcagcaatgcatcagaataaatattactacaactctacgaatgtgtaagattaagtgcagaaataataaagaaccaacttatggtgttgataatgatattttagagtagagtagagtagagtagagtagagtagagtaggaggccaggcacagtgactcatgcatgtaatcccagcactttggaaggctgaggtgggtggatcacttgagatcaggagtttaagaccagcctatccaacatggtgaaacccagtctctactaaaaatacaaaagatttagccaagtgtggtgctgtgcacctgtaattccagttactcgggaagctgaagtagaatagcttgaacctgggaggcagaggttgcagcgaactgagattgttctactgcactccagcctggtcgacaaacaagacactggctctaaaaaaaaaaaaaaaagaaaagaaatttgttattttaataatttttttgaagtcttattaggataaagactatgttatagtgacctttgaaacttttaagtttgataagatgcttgtaatataataaacaataaatttgaagtcacaggccgggctcggtggctcacgcctataatcccagcactttgggaggccgaggtgggtggatcaactgaggttgggagttcgagaccagcctgaccaacatggagaaaccccatcactactaaatatacaaaattagccaggcgtggtggcgcatgcctgtaattacagctactcaggaggcagaggcaggagaatcgcttgaacccgggaggtggaggttgcggtgagccgagattatgccattgcactccagcctgagcaagaagagcaaaactctgtctcaaaaaaaaaaaaaaaaaattaaggcacaaaatcagatttttagcaggacatgtcagacaacattgtataagttgtgaagatgtaaaaatctatcttgattattttgaaaaccaaaaaaaattaataaattatttatgtctatagttttctgaggtgaatttattctgtaggatatatactaagaagtgagttaactttaatggacctctttttgaaattactcaaaactattttatatacatattatttaggaattgtaatatttatgaaacttatcttttaaattctatttgtatctttagttttgctttgttactccatctctaaattatgagtaattatgttttccttttgttaatgatttgtagtactctctaatacacttaagaattgtttgattgtagaatatgttttctgcaggcaaaacaagtagatttttatgtttaatacacttgtaaatctcagcaataatatctgtttcattacttcattgtgatattatttttgctttatgggttctctttgcatactcttcccttaatttagttaaacatgtagtggtgacacaaggagccaaatgtaagatcttataacctaaatgagagctttgttccttatagtaataactaaccaatttaaaggaaaacatatattttttaaattaactgtttctataaggatataacaatttatgagtgcaatcattttacgagttagtcaactttaagcacttaataatcaaagtttttctcaaaattatagaatttcagaggtggacagtatgttagataccatcttattcaaactttctattcacagaaaaagaaagtcacaaagttaggtagcttgtccaaacctgtaaagattctctgacccaaatacagtggcagttagatgcaacagcagggttaatagtttgccttttttttaaccaccccatctcaaaaagttgagcctactaatactacaaaatttatgcatgatgaagctggggagcaggtgcatcagaaagatagcttcagtagcccctgcttcagcctaaagttctgtaacacatgaattgcaaaataattccatttataaaatgaaatttcaatgtgtaatgctgggctcaggtgtatctctgtaaatagcatgtaaagttacctccatgcttatgattcattgttgtttccctccctgtcgattacctgtattatagccactggggacatgtggctgttgaacacttaaaatgtggctggtatgaattgagatgtgctctaagtgttaaatacacattggttttcatgtccatatccagctctgaacctctgtacaattttgttttagtgggggtttggggttactatgcatatctcttaccaatccagtcaaacctttggggcccatcttgagtcctgctctttcattagaatgtttgggtctacattcatctctttttatttatatttcattattccctttctccctttttaaacttacataggttctttttttttttttttttttgagacagagtctcactctgtcgcccaggctgcagtggcgtgatctcggctcactgcaagctccacctcccaagttcacgccattctcctgcctcagcctcctgagtagctgggactacaggtgcctgccaccacacccgggtaattttttgtattttttagtagagacagggtttcaccgtgttagccaggatggtctcgatctcctgaccttgtgatccacccacctcggcctcccaaagtgctgggattacaggtgtgagccaccatgcctggccacataggttcttaatgatagtctatcatgttttgttactttattggggcatgcatttatgcctgcctccagaacaataattaaataaattgctactagaaatgaagttgcacctagcaatgtattttcagtctgcaaacatttagcagagggagggcacataactggttattaataaatacatgttgaattgagtttctgagtatatgtttgtcattttaaaaacctttatatttgaatatgttatagttttcaaagcactttcacatatggagctttatttaatcttcctagcagttttattagataggcaaggcagttattcttttcattgttagatgataaagtagggacttaaaaagacaatataaaaactggtgacacttttgtttcctgtgcaatgtgatttcttctcttttggttgaaaacactttaactatcacgggagagtaggtcctgatttcctttaagctcgtctgaagttattttgaatcctttatttataaccacaattttcttggatctcatccactgggctataggtacacaccagggtcttcggggcaagttgttgtgaaaactacttatacgtatataccaagcaataagtgattgttctttagtatatggttttcaaataaattttatctcgtgtcaactccgtttgattaggagtgcatgtttggggtcctttgtttagaaagttgtgaaatgctgtttagttttaacaagtaagtgtttagtttcatcagaggtatgagaatgaggggaacgggggtaattaaatgctatattctttaataaagtaggtcagtttttatttcaggtcaatatcttttttatgaacattcctaatatacttatgtaaatgtcctgtcttagtctgagcagaaggggaaggaaaatgaaacttctggatgtcgtggtccttttctaatcagaagagaccatccctctctctcaatttgctttttccatcttcagcttctacaatatagctatgttcaattgtcctttcaactaacgttggtggttttgcagcagtttttgtacttgacttaggtttaactgtttattcagaatttgccatgttaaagctaaacaggaaattaaatcacagatataaaatgatgtctgtattaaatataacctcatagggtttatgtaagagataaacacaaactcaagcctaaaatacagtgagcagttgtacatacattattgatatataattaggttaattattctttaatttaacaaatatttactgaatgctgttgtgtgtcaggcattagtgctgattactaggaatataacagtgaagatgatgttcaaaatcctgctcccacattttagtgggaaagttagtaaatgttttagaattttctctttcctttatttggtcaactgtttttttgtatttgaaaggaataatttaaaaaactcattagtaaatgacaatgagccacattgttaggaagaactttcccttgtcacacttactgaagtaggggccagatgtggtggctcatgcatttaatcccagcactttgagaagctgaagcaggaggatctcaggagcccaggagttcaagatgagcctgggcgataaagtggaccccatctttaccaaaaaatgagaaaaataattagctgtgtgtgttggcatgaacctgtagccccagctacttgggagacttaggcaggaggatcacttgagtccaggagttggaggctgcaatgagccatgattgtgccgctgcagtccagcctgggggtaccatagtgagattctgtctctaaaaaaaaaaaaaaaaaaaaaaaaagtagttcataaataattttaggaacactgaaaaggcatttcaaacaataaattcattaatttcctaatctttccttctatagatactggttctggttttgtatgtataaataataaataaaatttggtgaatacagagttaaagagtttagaagtatgtggaattcattaaaaagtctctttagggctgggcatggtggctcacacctgtaaccccagcactttgggaggctgaggcgggtggatcatctgaggtcaggagttcgagaccagcctgatcaatatggtgaaaccctgtctctactaaaaatacaaaaaattagccaggcgtggtggcacatgcctgtaatcccagctatttgggagactgagggaagagagtcacttgaacccatgaggtggaggttgaagccaagattgcaccattgcactccaacctgggcaacaagagtgaaactccgtcttgaaagaaagaaagaaaaaagtccctttagaagagatgtttcttttggtttggactgcattgacatttcttttgcaggttcattgtatatctatattttgcaattattatttaaattgttttctaaatgaagttcaaattcttcatttttcagatcttgacagaacaagtatgtactcaggtcgtacacaaaccacatccagagccagattctacagtgaaaattcagaatccaagtgagcaaatggcagttctttactgtattgtggtaggcgcatggcaacatatgagactaaatcaaaacttttcctaaccccttaaatcattatggtgtttacctagttcatgacagttttaactcaccttttatagtgttaagtatttatttgaaagttggtaatactttttgagttgaacataggatatggttacaaatctacaagttttttttctttgtttacagtgattcttaaagtggtggcaactttgttaaaaaactctacaccaagtgcagagctgatggaagttcgtcgtttatttttatctgatatgataaaacttttcagtaacagccgtgaaaatagaaggtaagcagtttggatactgtaacaacactttattccataattaatattttctctcttttagattttcaattcatttcaaatcttttccatattgctaaatacttttaatcatcagaaaaggcattttatgtttctttgacataatctgtattcggtattcttctatttatttttatattatttttattttgttacgtggatattatattttaattgtatatatgaatatacatataaacaaactcttatttagaatgtaatatcccttttagtggtacctatctatcaccaatggaactttcagttgtaattgtgttggatttccccattttcatctatgctttccaccccatatttcttatggccgaatgttgtgcatttttaagctagttagcttgaacatggggtaaagtctgaggccatgaactctggggtagtcattgcctgagtctataatttaacaaatattgattgagtgcctactgtgttcagtgtaagactttgtgctacacaagatagtcttagtacacagtctcagtacattccagtgggaaaccataaagcaatgattaatgtataatgtgttaagtacattgtgagtgctaaaggtggtgagaaagtagagaagcaataagtaaatctgactgtgaaagttaggaaaatgattttgaatgataattaggatttttcctggtagagaaataagagaaagtcattccaagtatagaatatataacgtgcagcatgactgtacaccttgctttactgaggtcagatcatattttcactattttatttatcaaagtttcaaaatagtaaattctaacttaatttggatatttttaatgagatcaaatttttttctccctagatgcttattgcagtgttcagtgtggcaggattggatgttttctcttggctatatcaatcctaaaaattctgaggaacagaagattaccgaaatggtctacaatatcttccggattcttttgtatcatgcaataaaatatgaatggggaggctggagagtctgggtggataccctctcaatagcccattccaaggtaacacgggatttaacattttaacatcatcagagttattgcagtggattaaatggctacaaacatgcatctggtgccatcttgtgggcatcttagattttgacagattcctgtatctcagttttgtatttttccctcattgttcatagactgttagaacttgaaagtggcttatagatgaattaattcaaaccccaaatttataaatcaggagttttatacccaaagctgacatacatctgttttatagcaaatctgggaactttaatctgagccacttgctctttcaactggttcttggaagaatattttatgaaatagtctctgaaatatactttttaagacttttttttaagaagtcagatttttttatttccaagtgaatcataaatacagtgtttaagtttagtggtattttaattgctttatcttttctttatttttaatcttaaaaatctgtatgtctattttaagtattatttgatctttggtaaaatgaaatagtgaattaaactgtacaagtatatacacattagattctggaaattcagagttatgggtttctcatcatgaagtgttatagaagaagcatgggtgtcagaagtatggcttttaatttagtctgtgccataattgagttttgtgattttaggagactcattaagtcttcttgaacacgagttagaaaaaaatgtttaaaaggatagatagtaaatattataggctgtgtgggctctatagcctctgatgcagctactcaactctgccgttcagtgtgaaagacaatacataatgtaaatgaatgatcatggctttgtttgaataaacctttattcacccaaagaggtgataagcagttttgtcccatgggccttatgttaccaacccccacttttgggacttgctttcttcttctgtaaaattaaggggatttttgtattatgagatattctttaaaggatggtccccccaatctaaaattctgttaacttatttaaatatacattaatagaacccatgtctgtaagagaaagtctgtgaactttaaaaaatattagaaaagcttttgtttcaattataaatttacattttgtgaagtattgacacctcagatttatcattgctttaacaaatttgaaaatagcaaagaaaaagacattgcaggtctttgtgcaaaaaaaaagtattctgattattaataaagaagcctaagtaaagtaacaaagccaaaacagcttatataaggataaaactgtgatattttaatagcttgtaaatttatatatttaatgatatgtgtgaattttttaacatcagttgttgggaagggtgcacatatgagcaatagatggtgaaaaccaacatagtaatagtactttggttattgtatattattagctgcttattctctgtttaagcttacataaatgtgtggaagttaactggcatatttggtttgggtaacattgaaatacttagcctaaaagaaaatagcttttaatattgctgagttatctgtgtgattttggcaatccttataataaatcatatatagctgtatttgttgattatttccagttacttaatgaaactaagcacttgctttaggactaacaaatgccagctttgaagtcttaaactttctggcattattttttctatttccacaatttaatttgtattatttagttttttctttttgatatgtacaaaatgccttaatgttttctttacttattcctaaggtcacttatgaagctcataaggaatacctagccaaaatgtatgaggaatatcaaagacaagaggaggaaaacattaaaaagggaaagaaagggaatgtgagcaccatctctggtctttcatcacagacaacaggagcaaaaggtggaatggaaattcgagagatagaagatctttcacaaagccagagcccagaaagtgagaccgattaccctgtcagcacagatactcgagacttactcatgtcaacaaaagtgtcagatgatattcttggaaattcagatagaccaggaagtggtgtacatgtggaagtacatgatcttttagtagatataaaagcagagaaagtggaagcaacagaagtaaagctcgatgatatggatttatcaccggagactttagtaggtggagagaatggtgcccttgtggaggttgaatctctgttggataatgtatatagtgctgctgttgagaaactccagaacaatgtacatggaagtgttggtatcattaaaaaaaatgaagaaaaggataatggtccattgataacattagcagatgagaaagaagaccttcccaatagtagtacatcatttctctttgataaaatacccaaacaggaggaaaaactacttcctgaactttctagcaatcacattattccaaatattcaggacacacaagtacatcttggtgttagtgatgatcttggattgcttgctcacatgaccggtagcgtagacttaacttgtacatccagtataatagaagaaaaagaattcaaaatccatacaacttcagatggaatgagcagtatttctgaaagagacttagcgtcatcaactaaggggctggagtatgctgaaatgactgctacaactctggaaactgagtcttctagtagcaaaattgtaccaaatattgatgcaggaagtataatttcagatactgaaaggtctgacgatggcaaagaatcaggaaaagaaatccgaaaaatccaaacaactactacgacacaagtaagctaccttatatgagttctagaaataaataaaaatgcattgaagagttgttagcaccaaaacagagtaatttcttatcagttacttcatgtttatattgaattatagtataatagtaatttatggaactaaatagtgcggtataatttcatgtatgtaagaaactaaaaatatctcaattatatttccaactctgccacattcttctgtgtaactttgctcaacctctctgggcctaagtttccttatctagtacaagaggttgtactaaaggatgacctttaaggtctctgccagttctaacattttataactctgtgactacatttacacattttgtactcaagatcttcattctgaatacttgattaattttaaccttttaagcttcaggcccaaccctgttctgtggattatagaaaagaggacttggagcccagattgaactgataaatgaaggggaagggaaaagggaactgttatttatccagtgcctactatgttccgggcactgtgctatatgttttcagatttaatcctcacaacaaccctgtgaggtaggtaatatggctgagaaaaattagaattgttagcagtgagaattttctgttcaaccacatgaatagaaatttgttataagacaattaaagactcttaggtctggttgttaggaaatgttagtgcttcagttttgacctcactggaataaagctaaaaacagatgatgttttctgatatggattttaattgttgagctctgagttatgactgtttctttattttctaggataaataataccttatggttaagagttgaagaaataagaatacatttaccgttaatgacttgggttttgttatcctctgggtgccccacttgccttttaatgtcattgaaaatacattgaatgtgtttccattaggtttatactatgaagagtaaaccatgcctgtcttgtgtctttgtactccagtaagaatccttcataatatatcgtgtgtggggaaagtatttttattttttctctaactgccaatttccatttttgtggcagttgcattgtagtgataattggcaggagatgagcatattgaattagatacagatgtaaaataaaggaaaacatcgtgcgttgtttattgaacaataggcttgcctgttgaacactaggcttgcctgtttttcatttggagtttatagacatttttctggtttgttttctaacttatcaaatgcatttgtgtttttgaattgaagtactgtaagtgaaacagacttcaaagttaacttgaaactgtcaagtaatattttttctaatcttgtgctttagttacaattagttgatgacatatatccagtatacttcactgtgtatatgctcacttcattaaggaagtaatgtggtctaatttaaagactcttaatggggtaaaggggtctggttttcagtgtgaactttggtgttaactttaggtatttgattatcttgcctagtttctgcaatagtaaaataaaagcaataatggagacttcagcccaaaaagtttcctgtgcaaggaattaccaggtgaataatatatgtgaaatatattaaactgctaaagtcatatgctaaagcattaaagcattattcactttactatactcacagtttcattttaaaatgaggcatttcttttgtattccacaaaagttcatcttttccttctttaggctgtgcagggtcggtctatcacccaacaagaccgagatctccgagttgatttaggatttcgaggaatgccaatgactgaggaacagcgacgccagtttagcccaggtccacggactacaatgtttcgtattcctgagtttaaatggtctccaatgcaccagcggcttctcactgatttactatttgcattagaaactgatgtacatgtttggaggaggtagaaatatttcttttttataaattaaaagcaaatatttaaaatatgccattgcctattctatttggttttgacaaaaccaaaaatctgccttgattaaaggaatttccacatttttcttgtatcttgtttaaattaataccatgtactaaatttattagtgataataatatatactgtttaagtttaaaatcaccctgtgacatgtgtattcagagcctgtagtatttaagcagttagtggatatcagttcaaagatgataacttagacaacaaatctacataaagtaaaccatggcctttctaaattttcaatttaattttttaatagtaaatgtgaaacaaattaattaagagagcacatcatttacataggcatgaatacaattaggaagtcgatggatataagtagcaagggcaacttaaatgatctagcacaacattcttagaaatgttggcttccatgcttctcctcattttccttttaggattcaaggtggctgcttcagctcccaacctcaattcataagaaacctgcccaaattaaaaggcagagatgactcttcttccttcctcttcttcctgtttttcctctgcctcctcttcttctctctcctctttcactttctctttttcttctcctcttttcttcttttttttaaaggaagcccgtcaagaaatttcccccttatatctcgtgagccagcaggatcacatcctctttcaaaatcaatcatcagaaaaagaaaatgggattataatgactggcttttagagactaatactggttaattaactagtaactagggttaggctagtctttcctatacccagtcaagctcaataataaaacaaaatataaaatgtgtgttagcagggaaaaagttatgactgttgtggaagaagtcaataaagtctgccatagaaagattttacttttgattttatttgatcaatttgttcttagactactcatatactttcattgctaattgttatatgataaattacctagagatggtaactgaggaaacctaaataccatgaaatacattgctattaacatgaagaccaatgtatggagataaattatgtaatttgataattataatatcagtagcctccaagtgagtgatactcagctttttttccaaccacctactctgtgtttttgttttctttaatgggctctcatgaaattacccaggtagaatttaatgtaatttaaattttttaaaggtaacactttatttttaggacagagagaaacatcttgaaatttaagatacacagtgatagataataattcacaactctaaaagggtgagaattattgactcaattttgaccatgaagtaatttcttttttttaatcttatttttttcccattaaaaaacagttcaggctaggtgtggtggctcacacctataatcccagcactttgggaggccaaggcgggaggatagctggagctcaggagttcgagaccagggcaagaccctgtttttacaaacattaactaggcgtggtggtgtccacctgtagtcccagctactcgggaatctcctgggcccagggaggttgaggatgcactaagccatgatcccaccactacactctagcctgggtgacagcagagatcctttctcaaaaaaaaaaaaaaaattatattcttgactgacaccaaacgaaagcagggtatttttttgacatctacattgtatgttttgtatgagaacactgtactaccaacttactttgagattttttccttttcttattaaataagttcttgaatttgtactgatttatttatactcccctatcatgtcacttctttagcagtatacatttcaatgtgactagtcaaaggtggggctgaagtcattggggatgtgacaaattgaaactgcctacaaaatagaactttcagttaaatttttaggttttcggtttcaaattttatttatggttatgaaaattttgaattggttatattttgagtttccatattatttttaacattagacatactttttatatttaaaaggttttgcctttcaacaaaaaacaatcagatttggcaaaataaatatttttagccaaatttgttgagtcagtcatatgtcttagaatctagtactgtatttttcaagcaaagtaataatataatgagttaatatacttggatacaacaaaatcctgtggagatgaatgcttagtttttggtaatatgatatctcaattataaattgctttattttataatttaattttaaatatagctagctcctacagttctataatttttcacttgttattctaattgtctaagcttttcatttaagtaagccaaaacatactcatttctgttttctgtattttagccattctacaaagtctgtaatggattttgtcaatagcaatgaaaatattatttttgtacataacacaattcacctcatttcccaaatggtagacaacatcatcattgcttgtggaggaattttacctttgctctctgctgctacatcaccaactgtaagtactttgcctccatctagtggttatattttataaatacatgactttagcatttcagtggtggtctaggctataaacacattttaaccagacctgtactttttaggcaaatttttaaccatttaaatttctatttccaccacttttgtttatcagtgttgggttccagctgtgtgtgcttatgaaaatgtttctctggtaattctgatgaatacttcatcagaagagtattgcattcttcatcaaagatattgtatatctcttcaaatctgtagtataaataaactcttaaaatccttgttatttaacattttcatttatttactgattcaacatttattttacaaaatctagccttgtcttgatttgtttctatataaaacattgaaatgtgttaatataatacattttaaaggcatttaatgttaattgtgtatgtcatttaaaataaaataggtcaatgttaactttgtattttagttgtcattaaaaacaaattctttgattcagaccaaggcagactccatagctacttgctcagatgggaaagaatatagaattttgcttcccatattacccacgttcttgttgccgtattagaaactcatccttaagctcagaaagcatacctttgccagagggaaatatttcattttactaagatgtgctttagttggtgagacactgtttccaagttgatctctaagtgtatttcatcattaacaagctttttctacatgactctttttcttactgttcttttgttaatgccaccaccatcaccagagcagccttgaaacttcaacattagcagccataggctatatcctcacacactttccccaggccttactcttctgttttattcatgaatttgctcaagaagtccacaaagggaagcattccagttcagaaggaggaatgcaacagagcaagtcaccagtagggccttaatcaaattagcagctgaaccaaggaaatggagctaagaagaacagtataaattgttgatggtgtgtgaagagtgcaagtatacatacaccactccttttctttaatctctcttttcctctggtgatttataccaaattctggtaaattgagagttgtgtatgatttttaaaatgctttctaatagtgagacatagagggcatttttttcttctcttttcttttctttttttttttttttgacagagtatcattctgtgacccaggctggagcagagtagggcgatctcagctcactgcaacctccgcctcctgggttcaagcaattcctctgcctcagcctcccaagtagctgggattataggtgtgcaccaccacacccagctaatttttgtatttttagtagttatggggtttcactatgttggccaggctggtttcaaactcctgacctcaaatgatctgcctgtctcaacctcccaaagtgcagggattacaggcatgagccactgctcccggccaacgtgttttttgttttatatattgaagactgaataaatcaatattttctttgtgacatttttcttgatcatataaattgcattttgttttataaattatcatttgttatgaagaaatttttaaaaggttgtattgaaattcactttgaaatgtaatattgaatgtttttaaattttgcatggaacataaaatgcttcttatgtaaaaaaaacagtttagcaataagttatttcaatttgtataggtttaaaatattcacattactaaatagttttccaaattttaaaggcaaaagatctttaactattaagatagaatattaaagtaatgaagtaaactataacatacatactattgcaccagtcaaatttgcttatttgttttatgatgattgtacagtaaagatactgacgctttgaggttggcttccaaaattattacgattcaattttgaccactgtagtttggaatttaaaattatttattacctagactatctcaacagacttgggaattcattcaattatagaaacctttgtttattttctcaatttctatatttctgttattttggcccattaactgtttggacctatgcctggttgtacaacatagctgattttatgtttttagaatgaattgcttccttaagagaaatagccgaacctttctcccattttgtatctggtagaactatgattggtgctgactgctgaatgttgtttttctattatgaatgttgtttttgtattactgggttgtataatattcttgctagaagttgtaacatagcagagggaaaaagttgggaaagaggaggttgaataatgagggaaattaaaccgaatatttgggctttttatatttaaatttaaagtgtaaaaagccaaaagagaattttggaagggataagtgaaaaaaggaaacattggcaacgtgaagattactgaaaggaaacattgtcttgtaggtgcttttagaattttaatcctagatatatgaagagagatggaaacatttgaaactaaggtttgagtgagctggtaattttgtttatatatatatagtttttcagaatattcttgtgtgcattttatgaagaaataggaataataatggtttatggcagtagttcacaaacttttgtgtatggggccagatgggaaatagtttaggtttcattggcagtattgttatctgtcacagctagtcaactctgctgtgatagtacaaaagcagcaatagacaatacataaacaaatattttttgtctgctgtttctgtgagattgacatagaagtggtctcttttctgccctggaaatttagatgagtacagtaatttatactagagataacatttttgtattgctgttatagtatcatcatcatggaagaaaatttttgaactgtttaatcttagttggaaggtacatatcttaatggaaacttaagaaaaaaagaacatatatatattgtttataatgatagtttgagcaccttgaacttagtactcttgaagaagcagcactttatgggagtttcagttttgcccagattacttaaattcatatgtagcatagaaaataaattacaaaaatagtttcagatctccgagttagaccaatagttttaactgtactcagggaaaaaaaatagacctcttagtatgtagtttggccaatctttgctttgggaaagcagcattatttttgttgttgttgatttttttagttgatgtttctgtgactagttaattgaatcctctcatttattctctaatatattgtttaacttggtcataaatgaaagtgaaaaattggagaagaaaaagaaaagcaaagaacatggatcaaccacaaattgcacactttgtgattttaagttgaccactttagtcagccatccagaacactgaatattatggagcttaattcagggcttaattttctctgtcccagaaaaatagtagagactgacatttctagctctcctaatagtttcataattataagaaagaagagctgctttttctattctgtccaaaaataacaaagtcttaattttagtttatttttattatcagaatgtatcataaatagatttggaaaaattatgaataatgttgttggttttgctgttcttttgtttatgtcataggactgatcatactttactattctcaggatgcttttatatgttttcctatacaatgtaccatgaaaatagcatattttaagatttatactcacatgtacttgtcaaaaattagaaagaatagttgatgatttttattgtgaaaactaattctatctgatatttgaatataatgaatataattattaatgtaataagaatcttaaacttagtataatacctatttaattacctttattcatattcaggcctcatttagtatatcaagttattttctagcatggaaaagtggtttataagttataatctctcaaatattttgttattttattaacttctcagaattttcaactataggaagctttctgtatatttgagaatacaaattacattatttccttatagaaaattctagaggttggtataaatagttcatttccctgagtcatttctgcctaaaccagaattgaggtagggattttgcagaggcattatgttagcttatttattaaaatgttccattaattataggaaaagatacttgttttgtaaaatagagtatgcattatttctaatatatgaactatacttatatatattatttgggcagagttactacaataaaaataagttgaagtctaaatatttgatatttaaccttgatcatgtataatttataaaatgaaaatctcttctgagaattttgcttttaataaaataatcaaatataatttttaaatatattattttgtgtttcaattttacattgtattttcatttaatttaataatttccttttcttgtactttttggtctgttgtctgttttgtctaatgcatgtccagggttctaaggttagtattacttttgtagtaattttcagctttcagtttcaagttttatttttacttatttatgaaatttttgacttggttatattttgagttttcatatcatctttaacatgagacatatcttttgtatatttaaaagagtcattgaaaggattattttcccaatgcattgatgtattactattttattatgcacaataatccctagattaaactatcatattgaacacaatggtgttacagtcatatgtacaatcagattttaattggttctaaggaaagtaaattggatgaaatatattattttaagatttaataattgtatgagagtgatctttattttttagccctatcttttgatgcttacatacttcattttttaaattacttttatataaaatggaatacaaattctcttttagactgttgtgttgaaagtgccttctactctaaaatttaattttttcagtcaaaaaaacactttgatggattatatggacaccttaataattctatttataattcactcattttaaaatgaaagcatagtttgacaggtcaaaacactcaaaaccattaaataatgaatatagagagatagctatctgcaatttcagtgattcaaaatgatgaagaatttgtgaacacagatctagatattctaaattctaacatttgaaaaattatttatagtatttgatagacctaagaaatggccaagttcttcattcctttatagaacattttaaattgaaaacagatttaaaatgaattttttgctctttcttatgagctatgatgtcatggtcatagatttttaattgatattatgaagtgatgctgtatattcatgaagtgctaagaagtaaagaatctgcattttaaaatccaagtaatgaattaatcatttctttatgccatgtgtactgaattggcataatgttgtaacaactgaaaacacatttctgtctctttccaggctcattttagagagaatggttttaaccctattttgctgttaaatggaaggaggaatggttgttacattttatacatcatttaaaactgagcttagttatataatgcttgtagtagccacctatcctttttattacccactttgtgcacaagaaatgttttgagtattttgagttcttttttcagtgttttctgctcacgtttccatgttaatgctcctgcttcttccaagcaggaagaagtttaggtataatgatggctataaacagtgtcaaaatggaacattaaataggaatagatacctattacatatgctaaccttgtagttgaatttatcatttggttaagagttaatattgattggaatggctagtgtgtccattttcagaaaatttaaataatttttttttacttatgaagtattcccttccttggttccttgaggcactgataaaatgaggcctagtcctaaggaacaaaaataattaaaatgctgtatagtccatggtgcaaaacaaaataagaaatgttgacattgtttaaaaaaccataaagttgtgcattttaagaaacacaatgctttgtaatattccctctgaaatcagaaatgtagtgaaagtacagttttccaatctagaatgctatgattctttttattactagtgttttataagtcacgaattaaatatctatagatgagttagcgatcttgattatttttaccctagagttttatcgtacatgtaaagtacctagtagtttcagtttattctaaaatggataagaaattgttatgcattctaatttgacagccatctcattttgatactaagttaaattaccatgtattttccctattattcatcatacatctataggaaagaaaaatcaaagcatatatttttattaatgggaatgaagattttagaaaagaaatatcaatttaaaatctttataaattacaaaacaaaactagtataagtacatatatgtggttctgtctaaatatctttgtgaaatgatcttaagtttaggatgtcatttttataactaaagacatttaaaactaatgttgattttaaaatgggcttttcctttattcaaggataattgataggtaaagtaaccgaatttggtaaccagctctggtgatatatggaattagttgaacatttattttatttataaaatatggtaaatatactaaatttatgttcacttgtagtatgtatgtatatgtattatatttccaaatttccaaattttaaacaagacttaaatcttctacttttttaaagacggaattggaaaatattgaagtgacacaaggcatgtcagctgagacagcagtaactttcctcagccggctgatggctatggttgatgtacttgtgtttgcaagctctctaaattttagtgagattgaagctgagaaaaacatgtcttctggaggtttaatgcgacagtgcctaagattaggtaagtctgttaaaacaatagtgcatgtcaaataattatctacagagcagctttataaagcactatggtacataaaatattaatgatataagttgatgattatataatatggagattatcttgagatacagagattatttttataattaatcagaattactaaattttaaaaaattatgccttcacattggagatttcacagaactgatcatctttaatggttcatagtttgaaatcaagagtgaaatatacttggaattctttcaaaatcagtaagactaacatttgtcattgaagtgatttttaatgcaaatccatttatgaatccaattttggtaaaccaatactgagggtagtgtcctggcctcacaaacatgtcagatacacataatgctagaaggttaaaataaactatcccaatcttactgtttcttggggtgaacaaatgtccctaataaatattgttatacccatgctgttcaccttttatctgtgtggcagtgaaactttagcactgaaacctcttagtaaatctgaatgaattctttagataagaaccatttctacctctcttaaaaggaacatttatttacactatttagactttcaaaaccagaaaactgctgtttttgtacttgccttagatcatgagcaggacataagaactgcaaggcatgaaataggaaggacgttcctgatatgtactgttttcacccataacttttaaagattatgtcaaaaattcctttctgattcaagaaaggaacaaagacttggtttaagaatggtgggatgaaacctttttttgtttgtttgtttcgtattatttatttaaagacaggcaagctgagaggaatcattttgtattcattataagagaaagattgaccacattaagatctttctggcaaccaagaggtgtgggttaactgacggtgggccattaaagacatttccattgacatataacaagagctgtcaaatgaactgtgtgagaaagagatatatatatatatttttaaaatggctcaatatcttgaaacctgcatttatttggttattctgtacttttatttttaaatatagtccaagactttactccctatttcatttttatcctaatactactagcacatttagttgtttaatcaaccacaggaaacttttataagtgaataataataaaacacttatattacctcctatgctatttactgttctaagcactttctatatattaattcagttaatcctcacaacagccctctaaggcagttactttgttcatcctcattttacatatgctaaaactgaggcacagatagtttaagcagctagcctaaaaccacacagctccaaactggaaaatacaggattcaaactcaggtcacggtctgatttcaaactctgtactacttgttacagtattctactgcttcttaaaataaatgaataaataaaaacatgtacatattgaatgcttattgacaaagcccagagactttcccaccatgaaggaaggtgaatttggggacctgtgagacttgagtatactgatgtactctattattgcccgaaatgggaagttgtgctcagtagagtcgacaagatagtcaaattaagggcagaagctttattaaatttttaaatcaaatatgaattttatgtttaaaatattttattgatccataaattcagaactgtgaaactcagagggtaacagaataaggaaggatacattgggggtttcagagcctctggtaatgttttatttcttcagctggctggtggtatatgggtattttgttttatttttaactatatgtatattttgtaggtactttcactactgtatttcataattttgaaaattattgatctagttgattttaagattaatagtttatgaagcaaggggaaagaaagggaagaagaaataaacttgcaactttttccaggatatcaaagtcaacaatttatattaacaatatgtttttgaatttttaaatagtttgttgtgttgctgtgagaaactgtttagaatgtcggcaaagacagagagacaggggaaataaatcttcccatggaagcagtaaacctcaggaagttcctcaaagtgtgactgctacagcagcttcgaaggtaagtaaactttttttcttggccaaatataatttacctgaaaaaaatcttttttaagttgatgagaacaaagtgccatggtattgctcagtgatagagagcaaggacattgtcattaggcagctctaggctgcttaacaattttgttaccaagattacttaacttctctgagatttgtgtgttttggttattaaatgaagttactaacaatttctacttaataaagttcttacaaatattataattagcactaaaaactgttatttctatttttaatagtcatatattttcacagaatttaatgtatgaataattctccttttaaatgggtaggcataatagtcaacaaaaactcactgaatgcccattcaatgaatggagtattttgaaatatactattagttttctttctaaattagctttctttatcatatgcttaactggcccttggcgtcacatccagtttcattaacatgctttttgaggttctgtgcctggtccttgcttacttctccagcagcagctctcagccctttacccttgcttgtgctgttttagtcataccatagacttcattctgttcatcaaaagaagctatttcccctaacttctcagacttttatatgatttcctttccataaagtattcatccttattttttatccagctaaaatctatgtaactactaggttaccttaaatgctacattttctcaggaaaatgttttttgacaccctcgctaccaccccagtcagtctagggttgttccttctgtttgttgttttcataaaattacataggtctgttatcactcattacacttgtaattacatgtttaatattgatacagtaactttttgctcaataagtgaaggtatgaaatagaagtttaattcatcttaaaagttctattgctttaaacttctgcagatggcaagcagactgaccacatatttatcctattcgttggttatttgcagtgttgtaacttttttctttttcactactgtcagagaacatttgtaatttgactatatattatttactgctcacaggactccatagtgctcttatttggtttgggaaattaaatacaaatggatcatcagtaatgcctgatatcatttgtgtaggcatagtagacagataggtacttgagggcagtgtctatgtgttatagatctttgtaacttcagagtaatttttttttttttttgagatggagtctcactctgttgccagggtggagtggagtggcatgatctcggctcactgcaacctccgcctcctggattcaagcgattctcctgcctcagcctcccaagtagctgggactacagatgtgtgccaccacgcccagctaatttttctatttttagtggagacggggtttcaccacattggccaggatggtctagatctcttgacctcatgatcactcaccttggcctcccaaagtgctgggattacaggcatgagccaccacgcccggccacttcagagtatttatagcactatgagtactttgtaaaaagaggacaactctagaatcagacagttctgagtttgtgttctggctttaccacttaactggttttgcgacctgagagaaatctcttaaatttctgtgcctccgttttctaatctttaaaatggatacaaatcttaatttacagagtgtttgtattaattagacaaaaagtgataatagactgacatgctttgatttctggcatgcagtgaacattcagttattactgatttgttcccctgtctagcagtttgacacttaatatattgtcgtgaaacgaataaatagtattttgaaggtgacacctttgagatgtaagcacttcaaaatagtaatgtatttagtaatttgtagatatactaaataaagtagataatagaaagtccttaaagatttttataactagtatttcactgattgtagaatatggacagaaaagcccagtgggaaggaaattggtagtaacttacttgagctaatcagtatttatctggcaagaactttggcagtgaaaaatgggtaagtagcgatgaatgtaaaaatactaggggaagatttgacatttcacaacaatgaatggatctgagtggtgtttctttttttttccttcctgtgttatgtgtttcttatgtgacattttaggaagtaaatcgagtaatttttgaatgcagtgggaaagtttcttgcaagtttcttgcatgaatcccataccttcatgtgacctcatttttatactgtgtgaaaaggaacaattacacaagcttctcctatcatgttgtctttataaggatcaaattagattaggggtagagaaatatagaaaagaaaatatttctaatcttaaaatctatgttataaattcatttatgctgtaaattatgtattattttctttaaccatcctgtagtaaatattattagtctgttattcagatgatgtagctgaagttcagagaggttaacttctcaccgatggtcatatagccagaagttttggaattgtaatggaaaccaaatactatcaacctttaaatactatgctctttttactatggcgtgctgccaaggaatcaaacattttaattttgggctagaatatcatgattgacattcattgagaaatagaaggtaccctgtttatttttcattgttagagtaacaacaagtgcatacctattatgggctggaattgtattttgcattatacatattatctaatttaatccatacaatttttaacacactgtataagtgagaaagtacttgattgagtttcagggaccctagttcacttagtagtctactatgtgactacattacctgaaatatgtagatgtttttcctccaactataaaatgttttgttggtaacaatctttaatgtctttcagctttaatgggctgtgactgattctttttaatcttaccgtttctaaccttggatagaccatgaaatggttacacatacaaaatctcatatactagtgtagtataataatctcatatattataaaagcatgatggataaatgaacccagaggctcaaagagatttgttaactagaggtagagaaatgaggctcaggaaatcttctgaagtccaagacgaatctttattctgctataactttacctgcctttatgagtctatagtggtagctgtgccaataaagaacaagaatgctagtatggaaaccatgacatgagtagagagcagaaaatatgcattgtaatagaggattatgatcaataaatgttaactcagagaggtggagatacatgatgtgaccagtttagcctgaattaagaagtgatacttctatatattatctgtaatatattatctattcacaattctttttattttcaaagactccattggaaaatgttccaggtaacctttctcctattaaggatccggatagacttcttcaggatgttgatatcaatcgccttcgtgctgttgtctttcgggatgtggtaagttatacctgattggtttccctgaaataaaccttctactgtcattcgtatgaaatacgttttataagaaagctgcttatgaaaacgacattccctagtatctgggattgttggtttattgcatacttctcattataaaatggttgaaccttagctttctctgaaagcttattgataatgttacttttaaaaaatggtctgaaattttgatgtaagttgcttgcatactaagaataggactagctctgaaaaattataattaactttatcttgtatcaactactcctctcttagtattccttgctccatttgcaggtactaaaaatttgttattattaatgttccttacattatggatgaaagggattaattcattaggtgttactgacaattacttttggaggaggggcaattaaagaataatctgcattttaaaaaatacaggtatctatgggaatttgagttagaaagatagcttaataaagctaaagggaaaagatgaagaggtttcatggaaccctccaatcttatgatcagttactccaggcaaataaaaataagattggccttttcaaaaattgcatagaaacatatatggtgtttcacatcagattcaatgctgacagcatctcttaacatggttattataaaccagccactttgaattctgtttttcttgttttagttgatgattcttatctagttgttgattgtatatgaaatgtagaagaaagtttatattttaaatttatatttaacagtaaattgaatggcatgctttgtactttagaacatgattaaaatatatttaggttatataacataatgctatatgttaggaatgtacaatagaaaaatcatcactctgtttaatatatattagttataaaatgctaggaaaattccaaacataccaacagaaaaataggcaatggacacaaggcaacaaacatgataaaaattcagtatccctagtagtcaacagaatgcagattaacacaggagtgagagatttttcactattaaataaactaaaaattttaaaatgataatacctagcattgtctgggtgcagtgaaagctgctctgtcaaatatcactggtgtttgagctttcgaatagctctttgccaatatggttaaaactcttacaaatcttgatgtcccaatgaaccactagaacccagtcgttctagtcagaatttgtttaacttaatgttttcatcagagatatctacaggaaatttggcagcattataaatatccagtaatagaattttggcctaaaaattcttggcgtagtcattcagcagtgacctattcagcctttaagcatatatttttgaaggaaatttaatgacaacggaaaatgatcatgatatattttaagagaaagcaacagcatgtagaagtacttacattaacaagtattacatatgtatactgattgtatgtacatacatacgtgcatctttatttttaaaaaaagactgaaaaaatataccagtattccaccaatgattatgtctaggtaaacagattttatttatccttttatgcttttttgtagttttaaattttttataataaacctatattgtttttataattaataaataatgaaggtttttttaaaaagggagactacattaaagtataaaaaccacaatgtaagaactcactgtaatctaaactctaacctagacttggaaagaagataccattcttactgacagtttaaccatttagaaatgggaatagtcatcctgaaaaaatgtgttgtgaaaaggattttttttaatgaatgaatgattaaaaacatggagctcatcttcatctccaaaggcacagtcagacgtaatatataacataccggaggagtttctattaagggtgacatagtgtttaaattgttagtaaattttgaattaggttatatggtaaatgatgatcatttcccttaaattcatggatattttataaatatgttggataacccagcagtggttgtatctgtgaaatatggtgatgaaaagagaatgctttggaaagatctgggtttgaattctgactctaccttataccagttgtgtggtctcagtgtttctgagtcttaactttttcttaacccttaactggaaacttaggataatatgtatttagtgcttgatacataatataaacccaattaacacaagttatattaccttgatgttgttcggaaggtacaccatggcaacacttaaagcagaccggagaaacattatatagctcatgtcttctcagtaataaaatacctgagcaagtcaattaatttgtataaaaatttagtcattccccagatgtttagcctctatgtatactgagcttcatttccaaagacagaactgggaataagaagcacaactgactaggagatctgggttaaaaaaaaataaaaaataaaaaataaaaaaaaaagctaactcttttcatgccatatataaaggaggttttcgtgtagctatgacagcagtttagtgtctgttatttacagcgctgccactgtgtagttggcattcattcattcattccacacatatttgttgaatgccttctgattgcctggtactgagtttctagtgttagaaatagaagtattatgggatattatggtctgtcacagcttgagcaatgtgtgaatctgttcttggttggtatcttttcttaatctgattgtgcttcattttcctttgtaataactgcttaggcatttgatttcttcacttctctctgtgtttattgtatcatcattgtagtgcaaggaatatgcattttaaacagtttgtaagacaaagtatctctagaaaagctataacccacaatgtatgaaatagtaaattaggaataattcagaacagattttgtgtattttggtcattttccccattagccagactgttttacaatattaaatcatcagtaaatatgtcttatttgctttttgcctgcaaatgcacataaattatgaatcttgtttgcattgtgcttagatgaagtaataaatataaagtgcctgttaatcgagttactagaatttattacttgcttgttttccttatttcttattctgcctcttatctgtgggccacagtaactgctttcagtttggtttgaaagtatcagttttacctagcttataaaagaagtttaataaagatttacattttattccttagatatactctagtatattagaggtcatataatttagacttgatacttattgtttccctgaaataagtttatctaggctttttgaatagagctctcaaggttacatgcagcttgttatatttttggaaagcatacttattttaaagttatctctctaccataccacagccgttgttttaactatcattgctttctgccttggccagtttttttcaaaccttttaccatttgctgttctcctctggaagaactccattttatctttgagtttggaaatgaggagcgtgaaatattggcagtgttttagaggtcatttttcctgtgcagaataatggactattatttcttttaaaaaatgttctatttccataggtttttgggaaatagtagtatttgaatacacgagtaagttctttagtggcgatttgtgagactttgatgcacccatcacctgatcaatatacactgaccccaatttgtagtcttttatctgtcacccacttcccacacttttcccttctagtccccaaagtccattgtatcattcttatgcctttgcatcatagcttagcttccacttatgagtgagaacatatgatggttttccattcctgagttacttacttcacttagaataatagtctccagtcccatccaggttgctgcgaatgccattattccattactttttgtggctgagtagcatgacatagtgtatatatataccacagtttctttatccactcattgattgatgggcatttgtgctggttccacatttttgcaattgaaaattgtgctgctataaacatgcatgtgcaagtatctttttcatatactgacttcttttcctctgggtaaatacccagtagtgggattccgggatcaaatgataattcttttagttctttaaggaatctgcacactgttttccacggtggttgtactagttttcattcccaccagcagtgtagaagtgtttccttttcaccccatctgtgctaataactattatttttttattatggccattcttgtgagagtaaggtggtatcacattgtggttttgatttgcatttccctgataattactgatgttgagcatttttcatatatttgttgttggctatttgtatatattcttttgagaattgtctgtttatgtctttagtccacttttggatgagttttttttttttgctaatttgtttgagttccttgtagattgtggctattagttctttgtcggatgaatagattgtgaagaatttctcccactctgtgagttgtctgtttattctgctaactgatctttttgctatgcagaagctctttagtttaattaagtcctgcctatttatctttgtttttgttgcatttgcttttgggttcttggtcatgaaatctttgcctaagccaatgtctagaagggtttgtcaaatgttacctgtttatacgatcaaagattgaattagctttttcttatgctgccataatcatacttctggctcatattgagcttatgtaaattcatgttttctgctcccccattgtttatttctcctctattttgtattcatatagtctcttgttccagttacactaggattttatatgtatttcagttggagttttatcctactaattttattcagttatagtatataaaacccttgatttttttaaaatccaggacattattcttttcaactttgtgccatctacatattttataagcacacatactatgttgttatgtaagtagtagataataatggacaaaaatggacaaagaataaaattttaatattctagtttttggaaattacattccaacctgtagatgatatattttaggagttttatatttatagttaaataatacttattaaataaatatatatatttagcaggttttcataaaagttacatatcatattttgcctccataaagataataaaatagcagtttctagtgctttaagaacttatacttcaaaaagtttgagtgttaaaactgtcttttcatttttcataggatgatagcaaacaagcacagttcttagctctggctgttgtttacttcatttcggttctgatggtttccaagtatcgtgacatattagaaccccagagagagactacaagaactggaagccaaccaggtagaaacatcaggcaagaaataaattcaccaacaagtacaggtacttaacattgtataattatttgaattttcaccatgatgtatctcctttttttcacctttacatctagatttaaactggacctcttcataatcacctcaaatatttatgaatggttggtatagaaatgctaatttagtattccttaattcaacaaaaatgtatgaatggtatttttatatagttgctacattctcattttatcagtatagctttggtttcagtgtttctcatttattaatacaaatcattaatttataccactatttaatatgcaagtaactcatatattgttaaatatattacttttttaacatttataaacatgaaagtagaaagtcattatagagttgttcaatgccaagggtaagccaaaatacaaatctttgtagccaagctcaaaagttggatttttttcttttttagctgtatacagttaattcagtatctaaatattctatcagtgatttataatcaaacatgtgttctaaactttataccaaagtggcctcaactaaaatcaaagacttgtggaaagttaacatggacaacaatgaaccaccttgggtcatgctgccttttttcatttgcaaaaaatgctcatgttgcagcagttcttgcattactagctttgcccactctacttgaacagcataaacacagtttctggcaactaacattttaatattggacaccttctatcattatcatttccttccaggtgtttatatcaaggttgtttctctattgtttgcagtgaaaccttgataacctaatggttatttcatgtaccactggattaatttgtagttgaaattttctttcctaaataaatgcatatgatttataaataaaatggatatttcaaaaagtgagtagaaattagtggtcaaatctctgcatcttgtttttcataagcatatcctatttcatataccttttattgatgtcatggagatatggattatgttttagctacagtattttgctgttgcatgatacatgtacttttaacacacaaacatgagaatatttcattataatatacttttgcttttaattttattattcaaattaaacatcatcctaccattccagttcatgttttttcaccatttaaaacactaagacttatcattttctttttcttcatttttaatgcttttatatccattatatgtacaaaaagtaatagtatagtgaaccttctagttctgagtttcttgtgtatttgtatgtctctgtgtatgttgctagaattactctacttaacaaatgtattattttctttctcttaatacataaactcttttcttcagagatgcattcgttattgctagtattgtttgcatgttgcagtaatacagaattgtcatggatcttcagtggaccatgtggcaggttgttacatgctggctcaaatttgattccatgattttctccacagttgtggtcataccatctatccctcatccaagtttgaaccatggattccttgccaagttaattcctgagcagagctttggccactcattttacaaaggtaatactgacctcatctcctgacctgtttgggtattcttatttcatgaattgttttaaaataaatattcatgatatacttgtttataaataagtatatacctcaggtttcatggagatatgatatgttgtatttatacctagctattgagagcgaagtatagcttttatatttgtattttattacatttctttaagtatcatctataaattaaggatacctaattatatgtatattaatatgcatagtggtagcactcaggagagatctcaggagagtcacagtttagtagtgggactaaatgagcctaatataaaggctactctagaataaaccttaaaaacatgccttgaaagcatcaaactgatctatacgttatttaacttccagttagaacaaagccccaacactgtaaaggaatgcgaaaagtccatatgaaaaaccataaaattaaatattagacatccaacaaaaattattaaacatgcaaagaaggagaaaaatgtgatgcataagcaaaagaaaaaaaatcagtgaatagaaacagattttgagacaacagaaatggcagaactatcagatacggacattatagaagccattacatgtatattcaagatgtttttcaatgtaatggaaaaagttaacatattgaagagagaaatggaagatataaagaaaaaaatgacaattttagagatgaaaaatacaatagccaaaatgataatatctctgtgtaggagtaacatgagattactgacttcagaacaaaggatttataagaggtagaattctgtgatagctccaagattttcctgtgtacgcactctgcaaaattcctgggatgataaatatgatggtgtttactcctgtgattaggttatgctgtatggcacattggcctttaagaaatggtgattatccaggtgggcttgacctaatcgcatgagctctgtaaaagaagagagtttcctcctctggtcacagaacaggaagtccgagagacttgaaatgtgagagaaatttgacatgaaggaggatctttattgcttagatggaggtgaccatcttattgcttagatggaggagcaaggacctgagaaaaccacatagctaatagcactcaccagctgacagccagcaagaaagtggggactttagtcctacagcaggaaggaactgaattctgccaataattgaatgagttttgaagaggaccctgtgctccaggtgatacaatacttcagtgtattccataactgcctaatcatatggaacagcacttttggaacaaataaagctagcaaaatatttttgttacaacttgatgaatgtacaaatattattttttataaatgtgcaacctttgaacagcatgatgaaatgaagggaaaaatatttttttcaacctcactgctggctgacaaacacatctagctctaaactgtgcaaaccaaaaaaaggatgagattgtcagcaaacatcacctggagtttgtctggtggagtgtgttccaaaggctctgctatgggaagtatccggttgtatctgcccagattaaggagcctatatcagaatagtaatgcacgttgtcaagaaagtcttgctatgaaaatagtgtcagttaaactgaaaatagtttcagttacactgaacagtggtgttagtagcataataaaattttgaattactttaaggccaatgtggtaaacttgctattattctttatattatgtgatactatggcagattatcataactgttattgcatgctgtagtgcagtggttattgggggaaaatgtctgtcaaatatttttcatgaactcaatgcttccaaacggggaaagatattttttcatgatagatatgatcaaagagcacaaacaaaagttaaaatcttagaggtacacaatttctgtgatatgtttcacaatttaataataattatcggcccagctcggtggtgcatgcctataatcccagcactttgggaggccgaggagagaggatagcttgagaccaggagtttgagaccagcctgggcaatgtagtgagaccccgtctatacaaaaaattaaaaaattaaccaggcatggtggcatgtgcctgtagtcccagctactcaggaggctgaggtgggaagattgcttaagcccaggaagtttaggttgctgtgagctgtgattgtgcctactgcactccagcctgagcaacagagcaagaccctttttcaaagaaaaaaattattaagtattctgatctttaggaatgatctgattttgttcatctttcaagttatcacctgtcattttatggattgggcagactattttatattttattttccagcaatagaagattcacaggtagcaaattaatggatctggaatccatttctgtcattgaaatataacttacatcttattttaactatacaaaatgtagaagagttttcattccatcaacatacctgtgtgacactactttctcctctttgagtgttattgacataaaacaaaaacaatttaagtatttattattcccgagttgctttattgccagttcaccttagattagataaattaacaagcaaaaagctcattgtcaacatcataaactttatttataatcgcagtatttgttcaaaatattcatataggcatttgggacgtgaggatcactctttacctaaaattttttgtttagttatgttgtgtaatgaagaaaagttacaagtgtaatagtagttgtctaaattaatcaccagttcactttcggtgaacaacacaggccatttttataattgtattctttttctttgtgctatttttgtctaattatatttattgatatgtaattttatgtctgcctaatcaaataacaaaaacagttgtgctgtttttgttttaaaaacaaaacaaagttttaaaagtttaaactttaacttaaactaaaactttaacaaagttttaaagtttaaaagtagttttaaaattttttattttttcagtaatttacaattggtaaataaaatttcatattttattttctaaatgtgtcagcgaatgatggatttaggacataaaagtaaattttcacaaatagtttgagaaacccttttctggactactcttcagctccttcacaccccactcccttctttcagctcctttttgagactttaagaaaactctgaattagctctctggtctctctctttaaattttgatgtaatcccttagttcagactcaaatcccttcttgaagtattgccatagtttcttcattggactcttagtttctaggctttctctcggtttattactgacaattttggaaataacactaatatataatacaacatagtaacagtaagtataatttatgtaccattttaatataataaatattttataatatataataactataataaagtaatttttcttcctaaaattctcaaaaggctccctgtaatttttgggacaaagttaaaatgccttaacatggcaaaactattctaattctgacttgactcaattacaataatcatctccaaagtgggttccttacttctcttactgatcgttattcttttatttttacagttttgctgcctatttcatggttttaaaagataaagcagattatgtcctttcttgacataaaatttctagtagtatttagagtaacatttcacaagggccctagataagatgactattgactacgtttccaactttatctcatgctattctttcttttgctcactatgaaaccatcagactaccttctagttttttaatcatgccaagcattttcatgcctcaggatgtttgtattttgttcctggcttttggctcttttccctgttttctgtgtgactggtacctactcattcttcaggtcacctcctccgagaggccttcccttactcctgtaactgagtagcttcctttccattattattctttctcatatcatcttgttttatttcctttcttctattcagtgctttgtttaatcgtttattagaatgtatgcttcaagagggtaatcataactaacttttttttagtttatgtatttatggtgtacaatgtgatatactgatatttgtatgcattagggaatgattaagtcaagctaattaatgtcttcatcacctcacgtatcattttttttttttttgtggtaagaatgtttaaagtttattctcagcagttttcaagtactgatacattattaactatagtcaccatgctggaaaatagatcaccagcattgattccgtctctgtaactgaaacattggtccttttggtgaacatcttcccagtccctagtaaccactattctactctttacttctgtgagttcaactttttaagattccctatataagtaaaattatacctatatttgtctttttatgtctgacttaatttaatgcagtattctccagattcatccatgttgtcataaatgacaggagtttctttttttatgggtgaatagtgttccattgtgtatatacattttatttattcattcatctcttcgtcaatagacacttgattccatattttgactattgtgaataatgctgcaatgaacattggggtgcacatacctctttcaaatactgatttcatatcacttggatatataccctgaagtggaattattgaatcgtatggtagttctgtttttaattgtttgaagaatctcaataccattttccataatagctgtcctaattttcattcctatcaacagtgtgcaagggttcccttttcttcacatcttctccaacacctatattttactttttgtttttttttttttttttggttgtttttttttgagatggagtctcactttgtcaccctggcttgagtgcagtggtgcgatcctggctcactgcaacctccacctcccgggttcaagtgattgtaccgctcagcttcctgagtagcttggattacaggcacgccccaccatgctgggctaatttttgtatttttagtagagacgaggtttcaccatcttggccaggctgggcttgaactccccaccccaagtgatccacctgcctgtgcctcccaaagtgctgtgattacagatgtgagccactgcacctggccacattttcaataatagccatcctgtgtgaggtgatatttctttgcagttttaatttgtattcctctaataattagcgaagttgagcattttttatatacctgttagctgtttgtcttcttttgagaaatgtctattcaagttatttgcctatgctttaattgggttatttgttttgttgctgttgagctgagttccttatatattttggatattaaacctttatcagatatataattatatatgttggcattttattattagtattattggttgcctctattccattataaaagtgcatgatacattttaataggatttatgagaagaaaaggaaaaagagtaaaaacaagctagggcaagagaaaagcaaaatacatatatatgaatatattgtaagctctagtcgataatttatttaaaatataaaaattataactacattaaaatttgagttctaaacattacttgtaagtggaacttcgggaagagcaaagtaagaacctccaaaatactgcttttctaaaagtagtattttcaaaatactactttttttatgttatttaaaataagaacactggcaaaaactgtcaaaatcaactttttcagttctttggaaagcaatcagaggtttacaacaacccagaggctgttaattcaagaaaaactctagacctttataagaacagcaagatttagagtgatttaactcaccctgttgccatctacctttcctcagctctgtggtagctttgaaaaccagaggccagacaccagtggtagttttgaaaaccagtagtctagcagccactgaggataggagtgggagtaggttaggtttagaatttcttagaaagtctcgaccttagagcattataactatttgaactgtatggaatcttcctggaaaactccattcacagggcttattattatttgacctaatctagagcttgtttagtgagaaaagcctgtctccaaggtatttgttgaaaataatcagcttttttctttaatgttgcaactgctcgaagtgacagtgccagttggggcaaacaagaaccttgcctaaaagcttaaacagatgtgagaatgagatatccatattcccagggctgtcctcaggcccagggaagacctgagaaggcctcagtctctcacctttggctgaccttgaggcccagcacaagaaggaagcgcaggctaagagagagttttaaaccatgagaacattgcaagcatacccaaacacacacacacagagcctgtggcaaagggtggaacatttattggttcaagacatttaagacaatgtctgtgcaatcattagctgaccactaggttaactgagcagagacttaagtggctgcagatgatggaaaacagattttacagaattagttcaggaaaatgaataaacagaacaagaacaaactgtaggtggggtcagattttcatgattgccacattatgttatttaaaatatccagtttacaacaaaaagaattatgagacaagcaaagaaataggaaagtatggtcaatacacagggggaacaaagcagttgatataaaatgcccctgaggaagcccagatacagaacttactagacggacactttaaaccagctattttacatatgctcaagtaattacaggaagcattttctaaagaactaaaggtataagagcgatatctcaccaaaaggaggataccaataaagatatatgtaataaagaaccaaatagaaattctggagttgaaaattgtaataactgaaatgaaaaattcacttagaggggttcagcagaagatctgagctggcaggaaaagaatcagcaacatgaagatagttcaattgtgtttatcctacgctggggaacagaacaaagaaagaatgaagaaaagtgaacagagcctcacagacctttgtgacactattaagttgaaccaacatatgtatactgggagtcccagaggaaagaagagaaaaagaaaggagcagaaagaaaatttgaagaaatattggcctgaaaactccctacagttgatgaaaatcattaatatatatgtctaaaaagctcaatgcactccaagtaggataaactcaagagagacccacatgttgacacagcgtagtcaaaacatcaattagaagattttcttggctcttaattttcattttgtctcttatgggcgtataagttagtaataatatttaattcctgaagttgtattcttttcatacacttagtgtagcaagcaaacaaaataaatcatatataaataatcgcaaataattcattgcagtatttttgtttaaaatgaactttaatgaggatttaaaatctttttgtgtattttttttcctctttggagttaagatatttaattaattttgcatttatggatttaatataaacaaaatgtgtaagttagttacatatagcttttttatgtttcattttaaattacagtgatttagtttgcttatattattatttgaagtgccaaagcttaatataatttttagtgctatactaacaaggtgctgtatgtttctttcatgatattccttatttagagagtttggaaaatggcaatttcagtaatttaatatgtaagacatattgaaattcttcataaatcatggtaaaacaggatttttggaggaaggaatgtgatatgtgaagtcaccgtgtaaatatcatgtcatttgctgaagttgtcctcatatttttctcaaaatgtattagatgaactcattatagtcaatgaaaaacagtaagaaaaagagacatctggcatccaaatgcctgtttctgacaaggttaagatcactctggctagtaatgtttctgctctgtgtactgacattgcctgttgctacagaaactgataagagctattgaaaacttacatgcctgtgattaatataacctacacagatgcaatcatttatagtttttctgcagttcatgcctaacttcctatttgaatcatggattaaatcctcaaagtactttagtgtcacaaagaggtattctggaaacacgagttatctaagttgaagtttatggtatcaactgagagcatgttctgttaaagatgtaaatgcatactgagaaatatgtaggttttttgactactgatctgtttttttattgctattataaaatatcctattggcatttagttttatttctatgtaatatcacagcgtgtatgctttacaaaacatatttatttgaataaaagtcattgaaatatcaaaattactacttcctttttgaaatcattcttttatcagcctcaataaaaataaaattgagatgtttttagtactatgtaaatattttgatgagctatttgaaaatattctaatatttgatttctagaaacttctaattgtgttttgtaatctagagatcaacatttatattgaagtttcaactatctagttagaaagttaaacattttaatatccattgtaagtcaaatagttgagcagaaaagcaaaatattatgtagttggtggcaaaagtcttttgatgtggtagcttgtgaacaccaaatcagattttatttccttaggtattttgtttgctagtgaaatgcttatattccagtctaatatagcttgagaagtttaaactttttgtatagctgttaatgtaacatgtcatatataacgatacttagacattatattaatggaaagtcaaaacactagaccatatctgtaaattagctaaattcacactaagtgttagatatgattgtatgacttctgataattaaactctataaaaattagcccatgctagtaaccatgacactgttttgtttttgttgttgttaaagtttttgtttctgcatttacattttctgtcctcttgtcgctataactatttaaactatttaattctctcctgatactttgctgcaattgttttctctcaaaaaatgtacaatccatagatacaaatgtatgttaaaatatattcagtggtatctctaatagtgaaaataactgcctcagtcatcttatcttctcattctagatttgtaggttattttatcaacttccaaaattttggctattgcctcagtttgaatgatcccaaaatgtacggctattcttcttttgacctacagatataaatatcttagagattctgtagactaaaagtgattcaaaatttagttaattattttcctgaagaaatctcattttcttcctttctcagttagtgacgtattaccactctttttcttaacctagatatttcagaaatacccttagtcttctcctccttctcatttatagggttactattctaatttaagtcttagtcttctctgacaagattttattaaaaatgccaaactattgtctttacttcttacctgtttccttctctagtcctttgcctactattattgacattgtcttgtcaaatgcagttattttaatttttaatcttggaagcagtaaagaatctaccctgattttcacattggtcatccaatatgaatgtttgaatattattatcatattccacagattaatctattctttcagtctatcatctttgaccaaactaacaaataaacaaacaaaatttaaatctattcaacaaatatgaggaaaactatgatataacattgcattgtgataaatgcatattttaagtcagtttaaattagtatttgatattaggaatattgaataatatgaggatgttatttattcctaatttaatgtatagatttgatataatttgactcaaaagaaaagggggagaaaaaaatgggagattttatttcaaaacctggcaacatttttctgatgcttatcctagaaaaagtattataaattcacaccctcaggaaatctgaatggtatgccattagtttaaattcaagcaattaaaaaaactgtctaatagacaacacccaagaattgagtctgttactgacaaaatcccttcatattgtttttaattttttagtatgtgtgtacaaaactttcagaagctgtgatcacacccaacaattctatcatcagaacaacacttctactagagatttcacaaaagattttgtgagatgtcttgctgacatcaaggtagcctattttcctgttgggcagtttcctggtttcttgtcctaacaacctttgaattcaaagaaacaagcaaataataacaaaatctaagagaagttatatagaatttactgattttcaatttttaggagatctttgaaataatttagtctgtgcttctcattttcaaagattatgaaactttcaaacttaaatgcaagtttaagcaatacaaatagctaacatttactgagcttctactttaaagtgagaactgcagtgaatttacatatagtagcttaatggtatcttactttattcaaaacgattaagttaaggactgttatctccattatacttagatgagatacacttttcaaggttatcgtttagaatttggtaacattttattatatggagaactttattacattaacctttgtatgatgaaatttgatagaaatttaacattttaaagatttttttatttcattacttttagttgttaatattatatgtgtatttcattatctgtgtagttatatgcacatatatgtttctgatttaattttcacaaattgaaatttatatttatttacaaagaatgagcatgagtattccaaaatataggccttgtccttgaggaacattattatattattaatgtatttattcttttgaactaatcatttgacttgctttgcattttgcaagtgtgtcagaattttacgtattgtaattttaaaatgatcttcgattatcttgaatatttcagatattattagttattgaagtaccaaagaaagtataaaaatgactttatatttttaaggaaactaatagagaaatataagaatttctcttctatgattggcagctaacaatcaaaggataagaggggaacatcatataattattatttataagctgctttaggaaattgttataggaactatttcctgatgcttttgaaggcatcagttttgaaatgccagatgatttaagaagcaagaggattattttgatgctccctgaacaaaatagtaggtgtattggatgatatctttttgtttttttttttgtttttttgagatggagttttgctcttgttgcccaggcaggagtgcagtggcatgatttcagttcactgcaacatccaccttccaggttcaagcaattctcctgcctcagcctcccgagtagctgggattagacgtatcccaccgtgcctagcttatttttgtgtttttagtagagacggggtttcgccatgttggccaggctggtctcgaactcctgacctcaggtgatccatctgcctcagcctcccaaagtgctggggttacaggcatgagccatcatgtctggctggatgatatctttcaactgagttgtgttactactatgcacatccgtttagcaattttttgtttctacaggttttgttttctttatttgaatatatgaaaacatttgattaataatacaagatttttactttcaaagcttttttctaacctagtttctttcattacagaaacacctgctgcatttccagacaccataaaagaaaaagaaacaccaactcctggtgaagatattcaggtagaaagttcaattccccatacagattcaggaattggagaggagcaagtggctagcatcctgaatggggcagaattagaaacaagtacaggccctgatgccatgagtgaactcttatccactttgtcatccgaagtgaagaaatcacaagagagcttaactgaaaatcctagtgaaacgttgaagcctgcaacatccatatctagcattagtcaaaccaaaggcatcaatgtgaaggaaatactgaaaagtcttgtggctgctccagttgaaatagcagaatgtggccctgaacctatcccatacccagatccagcattgaagagagaaacacaagctattcttcctatgcagtttcattcctttgacaggtaggtactgaacttattattcacagggctttatacataaaaggaaaattagactttgttaattttaaaatataaggaagatcttgaaaactttattaacgtagattcttattacaaagacaatcaaaatgatggctcaacctaatcttataataagacatcttaataatacatcttaaagaagaggtttcaatgtgatatgatggatagcacattgaattggaagtagggaaacatggattatggttatattccattatcaaaggactacagtacatcggggtgttatttttctctttggacttagtcgtttcatgtacataatggggaaggggatgggtcacatctgtccaaggtttatcctggctctgaaattccattataatattataaaatactataataattgttggagattatatgacatgctttaagtgataatatttaaatttgaaccttaaatggaagtatatggaaaaattttaaaattgtttgtggtcatcttctttatgagatttccaataccaatgtaaaagctgtattttgaagcatgtatttaaaagtaaatatttttgaaaggtattttggcattttaggtatcgaaactatttataacatggcccatatgtcatatatctacattcaaatgttaaatcatgcaaggaatttttttaaggaacaattaactttttattccagtatacattcaataaaaatgatagttcacagaagcagaataagatattttagaacctaataccctagtcatctaatatcttccactatttaaaaacatgtgcaagattagaagaatattttagtcactaattactaacagtagtacttaacattgatcactggggttaatgcctattccaaataatgtttgcgtgttaatgtattaactgaaaaatgtgatggcttaccttttaaagtaaatcattgttattgatgttttaaaacatcttttcataccaaaaatttatgtatatgtatgaggtgattgacaagcaagtgttttttttgttttagaaagacaagatcaaattaggaaataaaatgtttctaaatggaaatgtcaaagtatatagtcaaaaaataatatctattccatattgctttctctaaagtagccagactgctcttgttctaagtaacattttagtttaggggtagaggatgtggcggtatagtcatttcagtttggatgaatacccttttttttttgtttttgagatggagtctcactctgtcacccaggctagagtgcagtggtgcgatcttggctcactgcaacctccacctcctgggttcaagcaattctctcctcagcctcctgagtagcacctgccaccacgcctggctaatttttgtatttttagtagagacggggtttcaacatcttggccaggctggtcttgaactctgacctcatgatccacccgcctttgcctcccaaagtgctaggattacaggcgtgcgccaccgcacctggccgaattacccttttaatacacaatataatttaaactttgcctgtaaacacttttgccagtgttttacaaatacgtcttgaaaatctgttgtggaaaatgttaagtggcactggttatcatgcagaatataaagatgaataaaattagttttatcttctatgaatttagagagtagtaagaagatgtttgcaaataattgctataatagataaaatgtgtggtgtcagaagttttaaaaagtaaaaaatggtaggactataaaatgtaagaaatatttttctttttttggtattttggtattaatattgtgtttggatgttcattcatatagtgatgttccctgggtgttccttatgatgtttcacatttatttcacctttttcacatatttggtttatgttttcacgatatgcctatatgtgtgtttataagtttgtataaacatatgcatgtaagtatatgtacttgtgtatttctataagcctataaggtaatatatagtaatttaagttttgtattctagttaattttaaattatatctttaaatgttggtaaaatacaaaccaataaatacagatgattattgtgatttacatatgaaaatccaatgaaataaacattaagtaaaattttttgttttaatttggattattgttagaatgagttttttaattaaaactttaaaaagcagtcacctgagtgctaatattcttagctactcaaaatttattatacttttgagaatattgctttaagaaaaatacagctttttatgttcctatagcatttgtacaaaatgcagtaggagtggaatcattattctaaattgcataagtacaaatgaaatggaagagcacaaagcatatttcagttctttttaggaaaagagtctctagtgtagttaatatatgcaatagctcaagtactatcaaatgtaaatgatgaggtgatattgatgaaaggaggggattgaggtctcgggggcgctgatgacggattgaacagaagcggccttgcactgcacgtaactcaagtctgtcgtcttcactactcaaagccataatgggaggtggcagtttgaaatgagttgccacggcaaagagtattatttttgaaatgctttcacacaaatcactaggccctgcatacaacttagtttcatgctttaatgtcatcaggaggcacaaattggtgtgtctaattgtttgccacctgccagcaaaatgagctgccagccagccagacgggtttgattgtctgtcagccattcaatagattgagagtgacaacatcaaaaatttaacttcaaactctgaagctttgagcagcttttcagagacatcatccccacaagtgcttctggaccagtgcatttttcaattatacttccagggtattgctaccatttgccttatctgtcttaaggtagctataattacattatgaggtatataaacatgtttctgaagcactaatgtctgaaatccaagttatgacatgtcttttaacatcagattgaattcgttgaaaatgagatccaggatgacaggctttagaatgaaagtcctgaatgctaccggtttcaaacacagaatctatcatgggtcttactttaccaataacgtgtttttcattttaatctttagttgaaaagtagatataaactcagttggtcgcttctttgtaactaaatcacactcctaataatattgtacagtctcaatagaattcatgtaggattttacttttgttaaccagttgtttattgattatattgcagacatgctaacaatgatttccttatacttatcctggattttaaatttggaaataatttcctagaacaactgggataatttgagttatgttaacttgtgttctacgtcgagtgtatctcaccccttaggatggagcattggtgaatttcagtgttttgaagtttataataaaaaattgcaacatcaaattcttagaaacatttagacttaattaaaataaaccttttttctttactattacatatttcatcagattatgaaatattacataaatgttctgtacatataaggaaagtactgattctttttctatttccttcagtcatctgtgcagattaagtatatatctttgattatactcagtgatccgaacagatgtgtactcatgaagtattaaaatgctagagatcctctagtactgttctataatgagcaaacactgtatgtaaagaggaaatacaatcataaaactataacaattttttcaaagttctgttactgtgaggcagagagaaatatttatgatggttttatttttaacagaaaagcttaataatctcattttagaattcttaaatcaagttgccaagttctctaacaatactatctctttagatagattgctatatttatcgatggtttataaaatgttttaattgagctattatttttcatgtactgtgtaacttttactttggagtaatgcttttatctaaagccaccaattaaccttttacttaccttttaaactaaaaatttaatcttatatatctgcatgctttttatcttttgagtgtttggtatatatatatatctatgttttggtttagttttaacttcctaggatttccagagattcccacttagtttgaacaaaagacaaaaaaaaaaaaaaatagagggcaatgtgcttctcatacatttttaactgttagtatgtttttaaaaattgttttaagtgtgtgatatcacacaaagcttatagttgtgttgcttctttggctaacagacctcaaacttacacttcactttttcagattttgcaaacctcctgtattcaaattactgggtttgatatattcagggaaactagtaggtattttttcctcaaaattttaatatccttgcttcccagtgtttaattatctgaaaaagaaaaatctattttgtaaataatatagggccaaaaaagcaacttagatagacttcatattattaaccatgaagtataagcttgagctaggtattttctctttagtttcattagtattctaatattgatattagtggtaaggatgaaatttcagggtaaatatttttaaaaatattgagtagagttaatgaggtcttatgttgatttatttaaagttagaattaagtaactatgaaaaattataattacttctgaagacttcaatttgttcttattactatttttttaaaaaagtattttgaccctatcacttaaaagatgaacaaataaacgtaagccaaattgattattcatcttccagcctttacaattgaaattttctacatctagccactgtaatttctgcttttattatgctgcaagtgccctgagtatatattttaaggtcaattgctggaagattcagttttgactgagcatgtttgtgtcctcatttccccaatgttgttgactttgtgtctcctggcatttatagagagctgaataaagttcagtgagctgaataaagtatctctcattaataggtgatttaatgagattctttattgtttcttaaacatatttttttatattgcaattctcaaatattttacaaaataaggaagcatgatagataacatcatgagagcattcaccttgcgatttctgatgaactgaagtaaattgtcatgttatcctagaatcagtaacaaattatttttctcttttaagtttcaacgttttctttcaagatacatatttaacatccacatcctagttagagagtgataatctggaaattaggggaactggatattaatagttggtctctcttcaatttgttccaggaccttgatccattctttttggctctctggaactcagtttcccaacccatataatatgatataaagctacatgatttctaaaaagtctcataaatttccaaaatcctatttaaatgaaatgggcttattattagtcccccaaagcaacagatagatattttcgagcttggctaaaagatttgaatcccagaaaaggtgcatctccattctcaaactacattagcccctcagcgtctctaaggtggattctttctgttacctcctaactgccctcactatttccatgtttcctctctcaccccaaatttatcttttacatttatgccatagacatttttctaaagtgtgaagctgatgaaaattctgaaataattcttgttatttatataataaaggaggattattttagtttggaatagaaagtccacacctttcaccagccagaagtatctaaagcaattcctttaacctaccttgttttttcatgtctctttgccttgctaggtttttactattaaatttttgtatgcacttttccctacttggttaatttctattgatccttttcatttcagcccactcttccttgattgtgcacagcctgtgttcctgaaaggtcctgggcataactctgaccaggtcaattattgaaatatattgcatggtcagtttgtgtgtcatattccttaaagtatctaaggaatatgccccagggcatggggcatgtattatttgtcttgtgtctcccaaacttagtgtaatcccctgttagtgctcaaacagtagaagggaacagaaagaacgggattcttatagtgtgccatgaataattataaaactcacttgccttaatgagtcactgtttaaaagctctttcttatcttcagtatctccgtttgtacctaggataaaccatgatgtacacagataagatagtatccctgtttttacaaaatttaccgaactgtttaatggagactgccaataccctatccttataccacttttcctgtccctttgcattcacttctttggccatctcatccactctcctggcattaaatagcatctgtatgctgatgactcttatatttatatcttagtttgaacctcttttctaaactagagacttatctatccaattgcttattcaacattgctatttggatgattaaaaagaggtataaaaaattagtataagaaagctgctccaaccatattcttccctatcttagttaatggcaacttgtcctttctgttacttaaggcaaatttttttgcataatccttgactttactctcatgttcacctccagttcttatttaaatcttatttgctctgccttcttaatattgccaaaatttgaatcacttctcaccaggttttactttgctattccactccaaaccaccatcatttcttgtttgtagtattgtagtctcctagccattctccacagtaaccattgtccctcctaagactatctgtgacatagcagccagagtagtcctattataacataaggttatatccttctgtgcataagccttcatggtttctcatccctctctgaataaaagccagcatctatacaatggactacaaggccctgtgaactcagccctcttacttatctcatctcttacagctctccatgtcacccagtattctcttgtcacactagcctttgtactgttacctctgcctgtgatgctcttctctagatagcctcctggcttattctttcacccccttcagtgttctctcaaatactaccattttttgtcaatcttctctgagccgccctttcaacattattccttcttcttatctatgctttatttttcttacagcacttaacatctgatatactatatttactcatttatgttactgtatttgctatatctctgtattgaaatgtcagttccatgagagcagggattttattctatatattgctatatctccagaacttacgtcagttccacacacattgcaatgctcaataaatatttgttgaatgaatgagtgaatgtatcacctctagctttgagataggataaattcaatgatggaagaattcacacttacatgtattacttattagtcaatttattaaaatcatataatcaattaatgaaatattttatcaagtgaattagattgaaatatgtcctggcttataccactttgatgataacttttacaaccttggagtgtgtatagattctatgtagtataaaagaattatccactttcttgtagttaagagtcttaaagatgtgtgatagaagtttgaaattgtgtggaaagcatagtattgagattttttaaaaaattccattggtaaggaatatgtagaatagagcaggggtccccacccctgggccatggactggtaccggtctgtggcctgtcaggaaccagacagcaggaggtaagcagtgggcaagtaaacaaagcttcatctgcatttacagctgctcctcattgctcgcattactgcctgagctctgtttcctgtcagatcagtggtggcattggattcttctaggagtacaaaccctactgtgaactgtgcatgtgagggatcaaggttaagtactccttatgataatctaatgcctgatgatctgtgactgtattagtttgttttcacactgctgataaagacataccgaagcctgggaaggaataaaaggtttaattggacttacagttccacatggctggggaggcctcagaatcatggcaggagtgaaaggcgcttcttatatggtggtagcaagagaaaatgaagaagcagcagaagtggaaacccctgataaacccatcagatctcatgagacttattcactatcacgagaataacacaggaaagaccggccctcgtgattcaattacctgcctgcccctaggtccctcccacaacatgtgggaagtctgggagatacaattaaagttgagatttgggtggggacacagccaaaccatatcagtcactggtgccaaaagctttggggaccactggagtagaggattcaaggtatccgtcaggatgaatagcagatctaaaagaagagcataatacctgaatagtttagttcaatggctcttaacctttttgtggctatgtatgtttttgaaattcattaaaaactatatgttcactctaaaaaaatgtttttaccaccaaaatttgtatatattttagtgtatttatctaccctaaataggttacccacagtaggtacctagacttctaggtaagatttttttggtgtagatggaatagatagccagtgtgaaacgttgtgtaacaatctgatagaagattttataagagttgaaaatttttactctcatatatgaatagttgctaataccaagtaacattttaaaagataattaatttgttatcaacacatactggttagtgtggactttcaaattaattgtaagattgattgctaagaaagagaatggtttgagataaaagggaaggggtaatgttggtgaagaaacaatattaaggacaagaacgtgcagtcctttagtcctagataaacagtttggccatctgaatcaaaggggaaatagttcttacaaactcataatgtaggtgcagaaaaagatcggagaaatcggtcaaatacaggttcctgcttctctcaactaaacccttgtaacttggtcatctcagccatttgaacacataagtgattagaaactggaattcataaaaattatcagagatttttttcttcttgttggtcctaatttggtattctgaagtacatggaagtttcattttgttttcttatcagactttcagattttttaaaaatgctgtaactttttctcacccttttactgtaattttctgtcctttcagcctttcctcatatgacttgttttccagatcaactgtcatcctaactgttctcttagggacatgattctgtttgtcattatccttgaaatatagtgcctaaaactacacgtatgagatatgacaatagcagagtatatgaggattattgcttctttcagtctgggtatttttgctgatatagacccagactatatcagcacttttgggagccatagcaatactcgtaatagctaaaatgtattggctgcttagaatattccatggactgtgctaagtactttatatgtgttacctccttttatctttataacaatcttattgcacccttttataacaatctttatagcaatcttaagtttatgatgatattaccattatgcatctcattttaatggggaggagaatgaagcttagagagatctatgtgcccaataccacgtagtaactgctgaaggtagaattctaacccgggtctgtagggttagaattctgtgccatactgtcaaactctgctgagtttgcaagcaatgaaatatctggaggctttcacatcaattgctattaattcagtgctttgagatttttagtaggcatttaacctgtctatattttacttataagtcataattatgggatttagagattttttttctctcggtctcataacttatttttcctaatataacttatttctcatagcttccacattagacaagataccagtctgttacagagagcttttgctcaaagttagtaatgatcaacagatcagaaatttatagtaatagtttttctaccttctgcaaattcatctcatagcactgttaattagctcatgattctttatccataaataaacatctttgtgtctgctgttctaaaaaaatcatgagagatgcagaaaaaagagcattatactttcactaatgacttatcttcaaatcgacagttgatggttttgttttcttgctggagagtcaatgaaatagtacatctcacattattttataagtttagaggagaattttgataacaaactccaaatattggcaagttccttttttctgttgatttttatgtagatcattataagtagatgccttatatctcatagacaaaaatatatttcactttagacagtggtaatgattattaacatttataatacacttcataattgacaaagtccatttaaatatgatctcatttaatctccccaattgtatgcgaaggaggtagcattagtcttacgattttacactcaaaaaaatgtaagatcatacagtttgagagtggtccagttttcaagccttagttttgaaatatagtccacatcttatattcttttctgcaatgtcacactacctctcaatgaaataaacgaaggcattagatgaggacttgccaatatagggaatgaaggcataatgtgtgctttaggtaattagatagatagttgagaattaaaggttgagtctaaagaatttgacaccaacatgcttaaagagaaaagaagaaagtacctagaaggagatagtgaagaaattttttggcatgagtaaaactatttaagattataataccttaattatattaaggtattatacaaaatgttttaagtatttctaaaattaagaataataattattacaaatatagattattaacattaaagaagtcactgaagatattaacaaaaccacttatttgtggaaaaaaaagtgttgatattaaggaagtttaagcaacaaacttatttgagaaaggaccattgatgtagttttctttaggtagatttttttcattgagtaagtatgaaatagagatgcattaaaaagatgtaaatcaagttggatattttagtactgtcagttaccagtttccaagcattacatttgattaaaatagatcataaatctatttgtagatgaataaattctgtgatggttgagtaaggtttggaagatatttgctaaatgaagtttgcagtgctataaactttgagaagaatgaacctttactgcaagaaaatttagatatttattaagttagagaagtagtttctttatacatttttaaaaactgactaatatccatatttatttgtcatttaaccttaacacaatgtcaaattcagaaatttttaaatgaaatacatttaaaatacgctaaagaaacctggggaaatgttgaactcctctgttaaagaaaccaaggctcaaaagtgaaataaacttctaaccaaatgtctctctatcatctctgttctctttcattctaataatattcctactataaaagcaactcaattttgttcagaaaaataaagcataactttattgtgctcttagaagtttatttattattccttggtttaattttcagctttactatgaagaagctttagaatttggcatttaaagtctgggcacggtggctcacgcctgtaatcccagcactttgggaggccaagtggatggatcacctgaggtcaggagtttgagaccagcctgaccaacatagtgaaaccccgtctctactaaaaatacaaaaattacctgagtgtggtggcacgtagctgtaatcccagctacttgggaggctgacacgggagaatcacttgaacccaggaggcagagattgtagtgagccgagatggcaccactgtgctctgcctgggtgaccgagtgaaattctgtctcaaaaaaacaaacaaacaaaaaatcaaaaaacaaaaaaagaatttggcattcaaatgttttatgtttttacatatttatgaatattttaaacatggagaatgtgatatgggtaagatggacattttttatgtatattttgccaaaaattctatgtgcaaaggcaaaatctcctaactttagcacaaatttcttaatattcccagatttatgatcacagtccatttgccatcttaagaaaggtttgcagactcctaagtcttcaaaaatgttggccaaatcaattaggcaacacactttataatatatccttaatgtccatatcctttccactgacaaagctggactaaggagtttaaaatttttttttaattaaaagaagagagggagaaattcgatgttgactatgtatatctgttgcagcaggattataattcatcttcaacctcatgtttgttattttcaatccttcatttctttgcaggagtgttgtggtgcctgtaaagaaaccacctccaggtagtttagctgtaaccactgtgggagccactactgctggaagtgggctgccaacaggcagtacctctaatatatttgctgctactggagctacaccaaaaagtatgattaatacaacaggtattgtacttacatatttttgtgatactcatctttttatgttttctgtatcatttttctgcttatttgatcttaaaaattaaaataccctaatcatttaagattatcttaatttttaagaaggttatattttatgttatgacttttagaatttgtctgtagttgtagagtgcattttttagtggtcattttagaggacagtattggttttgagtcttctcaaaacagtgctgtttattttcagagtgaaatcagattactgaaagatatttggggagcagaagcaaaggataatttgaacactgaagtttgatatgtaaaaatcagtaaaatgtatcaagaatatcaagatgtactaaaaatgttagtgacagaaagtagatttggggacatgattggttgagttctaatatatattctttgctaaatcccctaagggaggcagagctcccctaagaaccttgacgatatgcaagcgcctcaacttgataaaaagtgcatgtgaataagaaccattgtttgacgttgaattaattcatatacatagattataacttgatccaattcattgcccaacaaattcctaatgaatctaggaacaaaaaatttcaaatcaattacaaatattaaaagtctgcctaaaataaccttttttttttgtaaatttccagaaatgttcctgttgattattagctaaataaatccttacccaaatctttgtgattccattttaggtatttatacagcgcaagatgatccctgacttttcttccctgactatagtagtcttctcttctccaaactgtatagccttgaacttttccatttattatcattacttagattcttcccatttttattaatttcatagctcttttttgtgctttctgtatctatcttgtttatcataccacctgagtctgacatatcatgaacaacacatttatggggttgtagtaagtagaatgtactctattaagaatatttatattggcaaatgaatgtcattaatggcattgtgtcaaagaatagaccatctattgtttacctgtattataaatagatatttctatctggcttgtctgaagactttaaagtctttccagtattagagtttcattctttatactcattcagctttctagaaataggagtaaaactgtttttcttttactaaagtatatacgttaaaagtgtaaaggttttaaaaatatgaataaagtccttattcttgttaggagttaggcaaatgcaaaatgaaatcaccttttttatttttatatgagacaagtcatgatgttttctttttaatttctattttaagaattaataatatggaaagtgatggtagcaagagttttgatgataatataaagtatataatattataatgagaaaaatgtaagtgataaacttcttaaaagtgtgtgtgtgtgtgtgtatgtgtgtgtgtataaattgtgagccaacagctaaagactgggcatactgttcatttcaaatattggcacataggtgctataaaatgttatagtggaaatcccagtaagcaattcagttttatgggaattagtataagataataatatttaggaacactagatgtccctcaactccacagctacttaatatacttacgtggcatatgatagaaaaatctttactaaaatggcatctttatatcattgagggaagactcattattttaagaccaggtactaatgtaactcattatagcccttcttaagcagtgatcttatcaaaaggagcattagatgcttcagtgccacaaatttacgctcagatagttcactccaaactatgtcttaaatgatgaaaaccaaaaatattacaatgtagctataaaaagataagtttttcacccctaagtttgcattgttttatcagcatcattttatcgaaaaattttttcatttcttgatgttttttatttataccccatttgtagtatgtagttttgttagattaatgtaagtaaatcaattagatttcaatgcaacatctgttatataaaattatgttcattagcatacttactaatggccaaatgattaattgtcaaattcggttttgaaaatctgatgagtaattctttcaaaatcagatagtaatggtgtaattaaaatttttttaaataaatttatgtttaaggctaaaaattattattttgggaacaggtgccgtggattcagggtcctcctcctcttcctcctcttctagttttgtgaatggtgctactagcaaaaaccttccagctgtacaaactgttgctccaatgccagaagattcagctgaaaatatgaggtatgcatgactactttttattcattttaactctttttaaatgtagtgaaacagtacacaaaaatacaaaaatatagaaagagttcttgagaatgaaggttaattattttgtgattacatttcacaattctgatatttttggctagttattatgtaaaaatctatgatatatttcgatctaagcagagatcttcagtgattttaaaatgttcactgtcgtatagtgtatagtaattcactgtcatttagtgcatgttactatttccggtaaaggttaaaacatgtacaaatggtaacatgataaaattgggcatctttggggggtgataaaaagtttaaaatataaactttcaggctaggtgtggtggctcacgcctgtaatcccagcactttggaaggccgaggagggcagatcacttgaggccagaagttggagaccagcctggaaaacatggtgaaaccttgtctttactaaaaatacaaaacttagcagggtgtggtggtgcacgcctgtaatcccagccactcgggagggaggctagggcaggagaatcacttgaacccgggaggcagaggttgcagtgagcctagatcacaccactgcactccagcctgggttgacagagtgagactgcatctcaaataaataaataaataaacaaataaacaaacaaactaagtaactttcaaaataaatctacaatgttatatataacatcattggaacttgaataagcaaacattaccttatctgtcatgattaaagaccattcctagaagagactggccctcattcttggagtaagattgtgtatacgtgtacacacacacacacacacacacacacgtatgtattcacagtttttatagaagtataacacaaatatagaatataaaagcttattgaaagaatgaacacactcatcatcaacaaagtcaacaaatagactgtacaccaggaacgcctactttgcacttttttcccagtcactgttcttgcttttcttccaattccttaccctgacttttaatactaagctagttttgtcctttttgaattttatgtaaatgtaagtacatcctatgtatttctttgtctctggcttcttttgttcaacattatttttatgagattcatctactattgttgcatataacgagtttattcatttattctccttttatttatttatgtgtctataccataatttattaattcattttactgatgatgggcatttggaattttccatttcttagttattacaaataatactgctatatagataaggccacttataattactatgagtatactactattacatgtgtgtactgcacattaatatgcatatttgttagataatttggagtgtaattgctgattcgtagtgtttgtatatgttcagttttactagataatgcaaaatggtttgcaaaagtggttgtactagtttactaactcagcagctgattatgagaggtcttgttgcttcatatctttgataggacttagtatttagtctctgtcattttagccattttggcagaagtatagtggcattccattgtatttttagtttgcattctcctgataataaatgaggttgaatactttttaaatacattggtcttttgttttcttcttttgatttgcctgttgaagtctctagtccatttttttaaattgtgggcttttttttgtctttttctaattaattttttgaaaatgagccctttgtagattatatgccatacatatatcttcttccattttctggcttttcttatcattatcaatatggtctattttgatcaacagaagttgtaaattttaattaaattcactttataattttttggtttataagtgcttttggtgttgtaaatgctttgtctacattttccctgtcttgccttctggctgctttattctttgctttttatatttagatgtgtaatccatttagaattttttgtgactaaaatgaggtaggagtaataggtatacgaagatgacccagcaccatttatttgaaagacacttcttttccctgtgttctgtcacttttgtcacaaattagtttttcatatacacttgattatggttcagcaagcagctctgcctcatctctttgtctgtctttaagtcataccatcttaattagccttaggtttaataaatattgagttgagtaagatcttctcaccctgttatttttcctcaagaaagtctgaggtattcttgatgctttgcatttacatttatatttagaattagtttgtcagtatccattttaaaaacaacttgctggggttttcataagtaatggagtatttggatctattgcaagtggggctatataggtctctttcaatctgtgactaacaaactgtgattatcatatattcctaccatttccttaggtgttcttattttttttagtaatgatttttagttttctatgtggaagtcttagatgtttctaaattgatttattcttaggaattgaatattttgtatgtttctattttcctgaagttttcagataaacttcactgaaactatttgtttatattgttcaaactcaataaaaaacactcattttgagcatacattttaatgagttttgattagtttatgcatccacataaccaccaccacaatcaagatgtagaatatacccatcaccccgaaagttctgtgtgccctgtttgttattcactcctatctctgctccagggaaacactgaagtgctttttaacattgtgaattagatttgccttttcaaggttttcacatagatagaatcgacagtacatactatttttggtgtctgtcttctttcattcatcctaatgatctgtgatttatcgatatctttttgtttatgagtagtctattcctttttattggtaggtattatcccattatatggctattaataatctactcttcttttcacctgttgatagccatctgggttttcccattttgttgtagttataaataatgattctatagatatttgaaaacacgtcttggtgtggacataaattttcatttcttatggctgaacactaggagaaaaattgtggttggatagtaagtgtatgcttaaccatttgagaaactgctgagctgttgtgcaaagtagtagtatcattttatattactgtcagcaatgtgtagttctattttttccatattcttgtcagcacttggtattgtcagtctttttaagactttataatgggtgggtaaccatatctcatttggttttatgttttctttcctattgattaatgatggtgagtattcttttttgcatatgcttatgggccattgaaatcccttgctatcttttaaaatttttcttgagatatgagttctttatatattcttcatatatgtcctttgtgagaaacatgcagtctagaattttttgttccattttgttgtatatatttttattttcttaaaattgttaataacaaaagtttctaatttgacagagttcattgtctcaaatagtttcgtcttttatgatttgtgccatttgtaaatcataagaaatctttacctaccacaaagtcatgtagatattctactatattttcttctaaaataaaagttttgtagttttatctttattaggtttctgatctgttttgacttagtttttgtgtctgtggtgaggtaaaggttgggatttggctctgtctttatgtatattaatgttttagtaccattcaattaccttggaattgatttaaaatcaattgaccacctatgtgtagatctatttctagactccattctgtcccatgaactatatgtcactactgcactatcttcctgtatcgtagctttatattaagttttgaaagagatgatgtaatgtaagtcctgtaactattttttttttacttttctgggttaattcgcattttcatgtaaattttagaagtgacttgtcaattctaaagcaacaaaaaaagaaattctgctgaaattttaattacaactctgttgaaccttttaatttgaggagactcttcatcataatactgagtattcaaacttttgaaattgtcattcattgggatctttaatttttttcagcaacttattgtagttttcattgtaaaactcttgtacttatttttatgtctttttaaatttttatgtttttctaaattttcatgtgtttgatgatattatattagattttttgctgtaaatttccaattgggagttagaagccagaccaaaaagagtacatagtgtatgattccatttttatgaaattataggaaatgcaaattaatttatcttaaaaaatagcaaatcagtgattgcctgtgtcaattttacctcaataaaactgaaaaaaggggataattttgtattagtacattgatttttatatattgattttatattttataatcttgccacttacttttagtaaacgtggtaagttgtttagaactttctaaactcacataatcgatctaacactttctgtagtttccttattattttctatgcatgagataatgtcacttgtagctttagtattatttatcctaaaatgtttgagaattcaccagtacagccatttctgcctggaattttctttctgggaaaatttaaattatagatttagtttttttaattgataaatgagtatccagatagtatatttatttttgtatctgttttgttatttttgtcttcaatgaatttacccatcttatctaagttgttggatttattgccataaattctttgtaattttaaaaattttattattaatattttaaaatataagcatgatccctaatgatgttccctctttcatttcagattttgttattttgttttttctcattttttcattatcagaatagctattgcttttcaatattatgatttccccccaaaaatgatactgtgttcattaatatttttagagtgttttttttctattatgtgaattctgctcttattactcctttctatttacatcacgtttgcttgcttttttcttcccatatcttagagtggaaactgagattgagtgtctataaactgtggaccatgggccaaatcattctgccaccagctttgtacataaagttattggaatacagccacactcatttgcttatgtattgcctatcactgctgtcacattactgtgactgagttaaatagttggaacagagacgatatggcctaaagcttaaaatatttactgtcttatcctttacagatgtttcccagcccctctcttggatctttgattttagaactttcttgtttaatgatatggtatatgagcatttaaagccataacttttcctccaagcacagttttacctgtattgtacaaatgtagtattttttatattcaattcaatatttttttctaattttccctatttcttcttggattcatacactttacagaggtgcattttgacatttatcttccttcactaaaaatactgccatgcaatccattcaaattgttgcatgaattaatagtatgttccttttttatttctcagtcatattctatggtacggatgacagtttgtttaaacatacacctactaaaggacatttaagtttttttccagtttggggctattaaaaataaagttacagtggacatctgtttttatgtgaacatacatttttgtttctctgggataagtacccaagagtgagattacttgctctatggtaagtatatgattagttttataagaaactgcaaaactgtcttctagagtggcttaaccactttatgtttccactggcaatgtgtgagtggtccagtttctcctcattgttaccagcatttttttaagcattctgatagtatgtagtgatatcttactgtggtctgaatttgcattttcctaatggataaatatgcagaacatcttttcttgtgtttattttccatcaatatgtctccttcatgaattgtctgttcatgtcttttgcctattttttaattggatcactgtttaacttttgaactctgagagtttttgttatattcaaatacaagtccttttttagaaatttagtttgcaaatattttatcttagacgtgctccctgtttcatccttttaatgggttttttagcagagaaaaatttaaattttttttaatctggcttgtcagatttacctttttatagttaagcttttggtgtcatgtctaagagctcttcacctacctctactttcccaaaatttatattgtattttctataaagttttgtggtttaaaagttgttttacttttaagtctgtgatctattttgagctgatgtctgtgtaaggtgtgaggtttaggttgaggtacacatttttgcctatgaatgttcatttgttccagcaccatttgttgaaaaggctatccttgcccatgaggcatgtttttaagaccttttaaggcaaatttagagaggcctctcttcttggattgcttttgccacacttagaaagggtagacttgctagaatttctcctgaatgctcagtgtatttaatgagatctctcctttctggctggagggaatacagactattcccagcactatgcactctcagtgatgtttgtgttgcagctccttcataattattcttttcaaaaaattattctattctagcccttggagctttcaggcttcacataagtagattgctattcagcctaagactcaggttttgggaaatttttttcttcatagcttcctcctctcagggactctgttctgcaaattctattcaccttggccgttttgaactacagtctcagtcgtgtcaactcaaaaacattgcaggactcagtatttgccataatataggaaatacctccataaaggaaacatggatgatgggggagctcacctcattggtttccctgtccttagggttcatagtcctgtactccctgtattgcctgaaaatagttgttccctgtatttgtctaatatttttaactgttagcatggaaggtaattttagaccatcttactttttcaaggctacaaatgaattttatattcttatcatgttgtcaatgatttcttttataaattttaattcttttaattgtttccctttcagtatgttgacagaatatcctgaaatgttaactcacttattattcctaattatttttctatagattgtttcaaaatgtatatgtatatacataattctgtcatccacgaataatgggggagttttttctcccattaaaatccttgcaccttttaatttctttttctgaacttacagtgccacccagtacctctaatgcaatttattatagtcatggttatagcaggcattctttttaaattcttcatctcagatgaaaaacattgaacatttatcattaactatgatgcttcttacctattaattatatataattttcaataaatgttatacatctcttatatttgtaattaacaaaaacttgctatcatgacgtatgttgaagtttatcttatgctttttaaatatacactaagatgatcatgtggtttttctccttctgttaacatggtatactatattgatttaatttttaaatgctaaaagaattctcaatttctgtaagaaatccaatttcattgtaatgtgaaatagatttatctcttgaaagcttctataagattatttttttattttttcccctgaaatatttagtaaacttcacaagcaaagacacctaatcctggatctcttcttttaggaaagtttcttaattaaaatttcaatttaattagttacagatctcccaaaattttctatttttttctggtgtcagctttgttaggtttttgctggcataaagcttttcataatattattgtgttattcttttaacattcatataatctgtagtaatgtcccttctttttaatcttgatattctttatttaagctagccagcttgtctgccttcctgccttcctgccttgccttccttgccttccttgccttccttccttttcttgataagctctggcagtgattaatcagttttattcatattgccaaaaaaatgtctagagagaaataacaagaaacggttaagttgaaagttgtacattgtttgtttccttagtgcagtagttttctaacatcagcatgcatcagaataacatagagggcttgttaacatacagattgctggatacctaattcagtaggactccagtagggcatgagaatttagggcacctctaacaagtttttaggtgtgttagtcaagcttatttagagaaacagattaaataggatgtttacattcatatgaatatacatgcatatacacatgatttattataaaaatttggctcacatgattatggaaactgaaaattcccagtatctgcagttagtatgctaaagacccaggagaaccaatgtgtagttctaatcaaagtaccaaggtcggagaaccaagagagccagtgatacaagttcctatccaaaagctggctggctcaagactgaagaagagccgatgtttccgtctgagtccaaaggccaagaagagaccagtactcctagctcaaacattcaggcagaaggagtttgctcaacttttttgttctattcatatcttcaactgactagatgaagccttcttccatgaaggagggcagtctacctattcaaatgttaatcttatcaatagataccctcacagtcatacccagagtgctgtttaatcaaatatctggacacccagtaaaattgacccataaaattaaccacgatgctagatcatgctgatgctgctggtccagaatacacactttgagaaacagtgtgtaattgataatcctccacatcgcaggagttatccttgatttatcgaggtcctattcccagacaatgcatggcccttccttactctagtttaacttaatttaccccaaattttgcagacatacatgtacatatgtatgcatgtgtgcatgttcatcttaaattcacaccctgcaagaaagtatacttattttattggtcaacatctgttttgatttagccaaatgactatcattttttgttgctcatcattcttttctgaatgtctgacctccacctagtatcatatttcttcttctgaaagaacgcttcttagtatttgatttagtgcaggtttgcctgtcatgaatttttagttcctatttctctaaacatcttggaaatccacctcgatgtttgaaaggatattttgaaccaatagaattctaggttggcaattattttcttatagtgctttgaaaatatcattttattgtcttttggcttttttcattctgtgttttatttatttattttataggttaattcctagtcatattgtttctgttctccactccaacccacctgatgtctgttttaaaggtgttctgtattttgggagttgataagttttactatgatgttttcaggcgctgtggattttctttgtatttatcctgcttaagatttgtagagtttttcaaatctgaagttttatcactttcattcaattttgaaacttcctagccattacctcttcaggtattgcttctgacccattttatccttctgttagagcttatcttacataaaaattagactttttaaaaatacatttcttacctatctatatcctttccccctatgcctatttctctctcagtgattttgagtattttcttttaacctatagtctactttactaattatctctttagctgtgtccagtcttctcagttcttaatttcaagttttataagtactcaaatttccatttgacttttgtggtttaatattatcttccagctgggcgtgatggctcacgactgtaatcccagcattttgggaggccgaggtgggcagatcacaaggtcaggagttcgagaccagcctgaccttcatagtgaaaccccatctctgctaaaaatacaaaaattagctgggcatggtggtgagtgcctgtaatcccagctacttgggaggctgaggcagaagaattgtttgaacccaggaggccaaggttgcagtgagctgagattgtgccattgcactccagcctggcgacagagtgagacactatttcaaaaaaaaaaacaaaaaactaaaaaaacttccaattgtctatcttatccagttgtttatcttgatctttaatttccttgaatgtaaatatagttaccctaaagtctttgattatttatcagagctacctctgtcatcttgtgttacttttggtattcaataatatcttcctgtctacttatatttcttttcttgttattattatgtgaaaaacctatgtagtatctgaaagattataaacataatatgaaagtacaaagtggtgttttcttccagaaaaaaatgtatttttttctagtaagcattagcaatcctaaaggaccttaatgaagtcaaggttagagggccagtcttttttcgattcaccacttctttaaagtgtagttctataggatctcaacctatagaatcataaatcagataaacctatagaaccttacatcataagggtttttctaagctttttttcctctttagtaggctctgagctccaaaaattttgttgaatttcaatcattcagttgcttctaccaaaacatgtccatgggagaagagcggtccagaaaccaaaatcatcttagagtttcttcttcaggatcatggtcaaataattgacttctgtcttaactctccatttccctcagagaagtgtttttgattttgtccagcttttttagttgttctcagcaggagaatttgcctattactaaaggtagaaatccacattatttttatatagttattgtgtttatgatcatatattagatggagtgtaaatgttaaaatggcttggttttttttaatcactgatttcagctggattatgtcagatccattccttctgatccttaattatataatagaaaaatgtgtaactttttggtaatttttaagttgtataaagttcatccaattaaacattttcaactccttacatgactttctttattttagtgaagggttttgatggtaattttttcctttctttaaacttgtctatatttttatacttaaagcagttctgctttttaaaaaaatcaaactgacaatttttatattttaattggtatttctacatcatttgcattcagtataatcactgacatgattgtattgatatctaccaatttggtaattgttttagaataaattgttactttccatctgtactttattttctttttcttcttttatgccctctgttgggttaatggagtattttttttattatttcattttctctccaatattgtcttattgtagacaatatttcaaacatttttaaaatgcttaaaataaaagacaactttttaaacattttaggggcttctctacgacttacaatataaatctttaaattatcagactcagtttttaatattattacaaagtttcatgtgttaataaagatgcttgtaacagtttactcctaattcctctttcacatccttagtgttaatgttgtcatacgttttacttttatatatcttaacgaagaaacagtaggccgggcatggtggctcacacctgtaattccagcacttggggaggctgaggcgggtgaatcacctgaggtcaggaatttgagagtactagcctggccaacatgctgaaaccgcatctctaataaaaatacagaattatctgggtgtggtggcatgtgcctgtaatcccagctactccggagtctgaggcaggagaatcacttagaacccgggaggcagaggttacagtgagctgagactgtgccactgcactctagcctgggcgacagagtgcgactctgtcttgaaaaagaaaaagaaaataaacagtacactgctattttgctctagacagtgaattttattttagagcaattaaaaataaatgcattttatagatttatttatcttttctagcactcttgtttgtataaatctgtttttgtctggtatattccttatacttgaactacatttaaaagtattcgtagtacaaagtcagctacatgaattacctccgtttttgttgtctaaaaggtctttattttaccatctttttctaaagaattttttggctacatataaaattgtggacttatgtaattttaaaatggctttgaaagggatttcatctcatttcttctggcttgcacagattctaatgagaatgtcattcttatctttgttcctctttatggaatgtgtctttattctctgaatgccttcttcagattttctctttatatttgaatttcagcagtgtattatgttacatatttttttacttatttactaaaattctagttggtgttttctgggcttcttgtatctgtagttttatgacttcattgtttttggaaaattctcactcaatatctcttaacatatttcttctgctctggtatgtctctgtgttagttttctattgctagaataacacgttgccacaaatttggcagcttaaatcagcactgatttattaattatatcacagttctgtaggttaagagtccaacactcaggtcacactgggctaaaatgcagatgttggcagggctgcatttcttattggagactctgttagaaaatgagcttccaggctcactcaggttattagcataattcggttctgtatggctgtagaacacatggacctgtttatttgcctgctgtcagaggcttcccttatctcctagaattcgccttgcgcatggcctcctacattcggcattagtaataatgcatccagtttttctcaaacttgggatctgtctgttttcctcttatacgtatcttttctgccttcctcttttgctgtacttctctagccagagagttttctgctttttagaacacatgtagactgaacctacctacgtaatctaggataatctattttaatgcccataaccttaatttcacttgcaaaattctttttgccatgtaatatagtttattcaaagattccagggattatggtttaggtatctttgtggagccattatttggcataccagcatactgcacttctctttctgtgactccaatcacatttatataaaattatttgatactgtttaatagcttttgaatgcaccaatgtgcacactccgtttgagtgtgtatatattcttttttctttttgttttaatatgtctatattttattggcctatcttcaaattcactgagtctttccttggcttcattgagtcttttgataagtccattgaaggcatatcatttcttttactgtattttttatttctaccattgtttcttctttacagtttcttacttttgctgaaaatttccatctgtttatgtatgttgtctgccttttcagctattaactcttgacatgttaatcacagttattttaaattattttatagttccaacatagggttcatctgtgattttgattctatcggtttttctctggctttttttgtttgtttgtttcttcatgtgtaaggtaatttttagttgaaaactggacatcatgtataggatagtagttcctgacagtcgtatttgtgctctaaatgggtctgcctctccttatgctaaggcttttgtgagaggggttgagtcattttagtctggaattgagcagggtttatgttttcttgttgtttttgttactctctgtgtaccacggactttaaatttctctacttttactttgtgtttagttaggtgctagtttttcagagtgtcttactcactatttctgttctaccctgttctgattcagagaggttctctacactatgtagtcccttctgcaatagtagactactgttatctgttactgggtgcttgcaagcctggtgttcaagggttctcttttgtcctggtctagactccattttagtcaagtgctgtcctggatcttgaaggtagggctttttcagtgattttatgtatttctacatgattggggatctgtaaatttcaggactcagaacgtttcccttcccctccctcagagtagagggttttttatgttcctttcctccagctgcaacaggcctcctactgtgccccaaaagtgacaggatttgttgtctttctctcaaatgcataaggcttccattctgtagaggagataggaagaaggatctaggcagaactttgtatcttttctgcagcaattaattctccctcctttaacctggagcaatgaaggaagttttctgcagtcttccatgctgcctccaatttttctcctgaatactggttaggtttgaatggaagaggctgggcatcgttgcaaacgccccttgtgtctatagctctgggggttttattctcttatagttcacacatggacttcagaaatttatttaaaaaatttagctgatttttttcttgccagcttaatgtggtgcccagtgctgctgcttcctgttctctgcctcaggttagcaagttcatgcatcctaagtcttcttggagttcctatcctcagatttcaagctgtttggttacctagcaacctcagctctctgatgaggcctaacaaagttataattctttagattatctggctttttcttgtgatttttgtgggaatgactctagttttctacatctgaaatagaagtcctctatttaattttaaaagttcaaattcttagttgatttttcaatttatatattcaaaaatattatattttactaaatactacactacaaaatgctcattaactgctattccagaaaacaaattctttcggtgctttactggggaatattcttgataacaccacctgtaaataagtggcagtggaagattggtctgaaggaaaagtaatgcaattgtaagagatattccaggccactccatgggaaagctctgaaattggaatggctccagaggtgtcctcaattgggtcaaaggagctggggtttttcatttttcttctaattgaccattgtttgaattcacactgctcctaatgagggggcttaaccttgggtgaagcagctcccttctagggagggattcagctgtgagccatcaccccacagttctcctcagaactctccagggaaagaatgtctctatcctaaaagaggatcttggatcttggtgagacaccacagctcctactacattaaaatatttttttaaatatacgaaatattgtatttaggagcataaatgttattattacaattttcctgtcaaatatttaagatacaattagccttaccctttttatcactagatttgttgtttggttttagttagacttacattcttgagtttatatttttatttcactatagttaaattttgtgtcatttaatttaagtgattgactggaaacaaggaattgttctacatcttttttttttttttttttactttcgtaattagcacactccaaaaaacttttctaagttggggatgtctaagggcatccccaaaaaagcattacataatgtctattcacagatgcgatcatggcacacaacagctctgaattcctgggctcaagtgattttcctgcctcagcttcctaagttgttgggactagaggtttgcatcatcatgctcacgtaggcattacacatcttaaaacttgaaaaatgtttacttggaattttgtttacgatataaagcagtaaactttttacttataaaaatattctatttagcttcaatttcttagtcttctatagctttatctacttttttaaccttttcatcatgcacttgaaaataattctgtttaggagtaataaagacaaaatgccagttttaaatttataagatcacagggaagtaaaataagtaagcattttttttttcaatatcatgttttccgtagcggccacaaccttagaaagctgtaacttaataaaattgtcagtaggtaattatgtcacaggtttgcagatctaggatacatttactcatcagctattttagtatgttaaattatatttaatattagaaatttagtgacaacagacacagtatttgagttgtgtcaattcctagtcataatatatagctgataagaatttaactttacaatgtgtgtttattctatcattaatactctcttaatcttgtcttttcatctgtgtttacctaaacccaatcagttcacttaccgatgcctacatttcctcatttacataggagcattcaattaataaaaatctactatagaattcactagtataataatttcttttatgtctgagtaaatcttttaggtacaatacttaagggtatgtaattatttctttttgttctatgttttcttattataaactacctattttatatgatttaagaaatgaattaggaaatttaagcactctaatctttcaaatcgaattgttgtttattatatttgtgacattgtgctaagtacctaggagaatacaaaaagtaaataaaatcaaaaataagtaaaaatgactttatgaagtagcacaaacataagggtgtttgttaaaatagaatacacaatgtatgtagggccctaaataagaatagaattattatatttttctagaattctaaaacatataacattaagaaaagatcactttgttatgaactatgtttataaggggattcatttagatgacaggagagaaaaatcttcttttttttttttactgatttgtgtacttaaaattaccatggctttggatatttcttgaggccagttacatttggcaagatttgataataattaagccgtgggttttcatacattatttttcccatggattaattgtatttttattcatacgaatttcttagaattaagtgtgaatgagacttccttaatacaggtaaaagccaatacatgattgcagtttttaaaaaccataattgtaagcttttgtgttttaagtcatattgttttaatccaatcattggagctatagaatttcatctaaagccttattatttcctttgaatattttgttttgagttggtaattttgttagagtggtttataatttctcaagtttcagcaagaattttcttcatggaaataagtaattctctttttttttttttatttgtgtaaatttaagggatacaagtgcaattttgttttgtggatatattgcgtagttgtgaagtctgggcttttagtgtattcatcacctgaataatgtacatgatacccattaagtaatttcttacctctcgctcccaccttccaccctccagcctttccaagtcaccagcctccagtgtctatcattccatattctatgtccatgtgtatacatcatttagcgcccacttataagtgagaacatgtggtattcgcctttctgtttgagtcacttaagataatggcctcctgttccagtaatttaattctttttcttaagagtttacacttactattaagaaaaatagccaaattcaaaatagtcatcaatcaagcatcttaaacacatcattagtgtgacttaaggggaaaaaatagactggggagaatagaatgagtggcttgaaattgtatgcttttcaaaccacacttgataaagtctgtggttagagcccaagaacttaaccaaatattaagttattagagtataagattataaaactcactcagactgtgcagggcagattcccctacatagggaaatacacctttgtattacttctgtgcataaaatgtcttagactaaatgaatagtttttgtttttgttttctgtggcaaaataggggtcttgctctgttacccaggctagagtgtagtggcatgatcatagctcactgcagccttgacctcctgggctcaagctatcctcttgcctcaaccttttgagtagctaggatcacaggcacccgccaccacacctggctaattttttaattttttggtagagacagggtctcaccatgttgctcaggctggtcttgaactcctgggctcaagccattctccttcttcagtcttccaaagcgctggaattataggtatgagccaccatgcccagcctaaatgaatgtttttgaataaatgaaagtaaactttcagagaaaactcaaaaatcactctttagaattttcccctaaagtcagtatattatgccagtttttcttacaaaaataatttgctgaagaatacctggttttattctggtggctatatgttctttgtatttttattttaaggagaaaattttatttatttttataggacttaagggcatgggcttttctcacattaacatagcttttaatttatttttttacatattaacagatagctgtctcatgtgtcttggaattggggaaaaggagttttacattgtgtgtttctttgagatgagaatggaaataacaaaatgacaatatagccacaatatgtcttttttggtattttttgtaattaatccttattttcaggcgataaaggaggttcttaggctgaagtttatgtttgtaccattttctttcagaatttaaattgtgtaacaatgaagctaatttatacagcatttacaaccttctttggaatacattgtggggaatctgtaaaaagcaacaacaacaaaagctttcttcactatgaaaaatgaggatgaagtttttccatttagaatattttgctgttgtaattccagcagaattatttgataatggtttatatacataaaacttctaatctcttgctgagtaaaatattatattctttgccccctattagaaaattaaaattctcattgcaggatgatacgtaagagcaacatttactattctaataaattttataagaaaatatttgcaaaaaaatcttaatagggattcactttctgagaaatatctgtttttatctattaccctttagtcaagataatcgataataatgtatatttatacatacttacagaagtaatcagttgctcggattaattgaagttctattttgtatttaacttaatcaccagtaacagtatttttgtaattctgaagcctctaaatcacaccgaaatctgtaaaataggggagaaagttctcaacctaggataaaaaatgttcctggctttaactcaataatagtacattaaatccaatagctatgatgcaaccctccattaatcaataatttttataattttactctcacttattaatcttaaataaaaataatcatacttcatttataattgagcatcagaaactattatatctagatttttctccttttaataaactcactcttaccattcttaccatttcttagtagagggaattagtttagctgggaagagctgtaggacatgattctagagatttgaaggaattaatgaaattgtagattcaaaaaagaatctctttgtattcactaacaggtaacttactgtgattatgcttattcggtgacttcaggtagcctttcttttgcttgcttctttgttaattctttctaatagtaaatactctcattaaaacagtcattctcaaagtgtgtttcctggatcagcagcatcaacaccactgactgagaatttgtacttctaacaaatgcttgccgtacacacagacctgctgaatcagagactagggtggggctcagcagtctggttatacagactctccagataattctgatccacattaaagcttgagaaccagtgtcttcaggaggtccttgctttaggaattacagagtaggggagactattgaaatctcttaatttcagtaagtctgccaaatccccttcaaatccctttttcttacgggaaaatgttcctccagaattttctaaatatatgtggcagtgatcaaacttgagttttctccatggtttctcctttctctagagctgttgacacgggtaagaggagacagagttaaacagaagtgctgatggtgatacttagagtgctcaaagatttgaaacttggctgtttccaatttaggaaagaagtcatccgatattattctctaatagctatttaattgcttaaaaaatttaaaaagaggccatagtttagttttaaaccttagtaatatattgcaaattattttatggttaattacctttttttcatttataaatttttgcctcatgtgtaacaaaatgttacctggcattgtggcagaccttgtattattttgtaacattgtttaattgctaactgtacatatcgtctgtgtagaagaatgtgtactcatctaatatattgactttggtttgtttaatgtatcagaatcacattttgtgagtgtaaatatgggtgtgttcaaagtagagcaaaaaagtgaacattattgacctctcactgtgtgctgggtgcttttctgtgcactttatatcccttagcttgtttaatcctcactgggtaggtactgcaatcatcttcattttgcagacatagaaagcctaatgtgcctaaggtcacctagctagtatatgatagagccaggattctagtctaagcagtcttactccaaagcacttttatctaagacagataaatctgttactatgttattcatttgtctaagcagaaatattttcctcctccccattttttacttttacatgtaccaaagtatttttaagaatgtcaagtagtgcttatgtatggctattaacttaaaattcaacagtgaactatataataatacagcagtttgtaaagaaaagtaaataggcttatgaaatggaaaatgcctactttggcaaagcattcaactgtattacaacgaatttcagttattcccttatttgtccagatttcaggtaatacctccttgagagcaagaattaaattatttgtaactggcacagggacccacattgtcagtgttccagatcattttctttgatggatagatacatagagaaggcatacaaaaactcatttacatgacgctcatagagcggtggacagtctttggccctttcgggtggcataaccccaattctttttcatagtatagtcattgcaatttagctgaaacctttcagtagccttatgactgtttgtgaaactgtacagggtatcccttatacatgaagcttgttattattccatgggctagaaaggacatttatgatttttaaatattttaatttagaagtaaagtttatttgacattttatattgaattatatttattagtttttatgtcttaatttcaacagcatcactgcaaaacttgaaagagcgttagaaaaagttgctcctcttcttcgtgaaatttttgtagactttgccccattcctatctcgtacacttcttggcagtcatggacaagagctattgatagaaggtatgatttctctattataattattttagtttcctataatgtatgtattaatcatggcataatttgtgcttctggaggaatatatatttccaaaagaatgtaaaggcattacttcacaaattctaataagatattcaatatgttttctcttcactcattttttttaaataacatgtttgcatggtcaatgccagtaagaaaactttgaagatgaagaacgttgaaaaggtgtcagaatgggaggctttggctctttaatccatctatcagggctgatgtatatcctgtcattaagataacctgtttattaagcagtgatctctgaaatttccttctgactctgagagccatgcacctttaagtgatttttcttattcacataacatttgtagtgtgggaatccttaactaagaagacattaaaaatctagagaaatacttaacaaagaattgatgaacccattgtctcctcaacagcagcttacatacagtaaggaggcaaaggagaaaaatttacaaggagagtggctttgaaaaatatggttaatcaaaatcgtatttctttttaaaaagttttgttttatgaatatttctgagcttcagaaagaattagataatatcaagatgatctgtaggtgaataatggctttagatgctgtttcaggtagtcctgggatttagcatccttgtatatcttttttgcttttcacttcctgtttactgtagaagaaagagagttttcctgtgcctgttctgttattgtcccaactgcttctacacagtgtttctattaggaagactgtgatagttaatgactcggcatctgggagctgactttgaatcctagttcaactactttcttagctttgtggcctttgtgaattacttagccactttgtatcttagtttcctttctataaattggagtcagtgatacagcactttagggttcttgtgaagattaaattatgcaaggcatttgaagctcttagaatattgtcacataatgagcttctcaggtttccaaaagtactgagttccttctgggctaggtactatgttacatagttttgatatattagtaaacagacaaagacgcttttcttcagatggagcatatattctaacaaggacacaaaatcaataagcattaaacaaaatgaataattaaattacatagcatgctagaagatagtgaatgttatgtaaaaggataaatacaacacagagaattgggattacagaatgacaaggttaggctgaagtttaaagagagtggtcaattttaaataggcctcatggtaaaagttacatttgagcaaaaccttacataataagtaataaaacttacttaataagtgccatacagcttattagatgaggagtgttctatgcagagagaatagtcagtacattggccctaaaatgatagaaagatgttcttggtatgatctaccaacagcaaaaatgccagtctcatgtgaaccagaaggacagtagtcgaatattagggccagagaggtaatgggttctttggctttaactagtgtgttgtagggaggctgctgatgttttaagtagggctgtcaccctggatgctactattgtcattattatactcccacctacaaagtgaagtataaaatgctctgaagaattggattctgagaagaaccatgctaattcaaagcagccgcaaaatgaactttaaaagttcttggaagcttaaaaactattgcttggccgcagattgtgtgtgtaatttaaatagctttgttctagatgtgtatgattgactacacaaaatcatgtattcattgattcattcaaaacagaagaaatattcctcatggagtttgcagtctaatgagcaaagagacataaaaaccaataattaaaattaaataggatatgtgctataatgaaagtatatacaaaggtacagtgggaaatgagactagatggcctactgaccacttgcagggcacatattcttctaactgggtcagtgaggtagttgtgtatacctggtcttactcctgctgccataaagccacttcctcatctttatgaggacacaggtttgaaagggttatgttccctgcttctacctaactcctgtaacagctcaacccagtcttctgaattccagacatagttgaagttacctagcatagacatctaaagccatatactccagggatacctcaaactctgtttatccaaaatttgttttccctcaatttacttttccttctaaatgtatttattttgtcattagcattactattaatgcaaacatttgaggtgaaaatttgatttttctttagctcttttctccttcaactttaatatttacaattacttcatgagaatgaataatttccgaaaacaatatttagaggatagttcttcaaatattattaacattacaaatattatatcaagccatgtataaaaaccttccaaagtagcctaaatattatgttagctaaaagtggtggcatcatagttacggattctaaaaggtactaggttatcagttggtccttcttgagttcctttttttgcttttaattcttttgatttcctgtagttagatgctattgaggagcaagaatgctggttattgatatttttattttcatgcttttctgtaacatgtgttactttattaaaataaagaagttcagtaaacatcattgaaaaaacaaatcttaaatgtttcctcattccctacaagataaaagccttttattttttctgttgctatctatcttttcctaaaatgatttgataggttttacagaaatgtataaatactgaccaaagacataataaaataaaacagggaataaagttagtcttgtaataataatgttagtagtgagtcctgcaatgttattaaaactaagacaaattctgtgcaagttttctagccgccagagcaaaggcacaattatgttgttataagactcacgttactggctcctaagtgatagtctgtggcaattttatgttaactgctctgtattggaaaatcaggaacccctgtgtgtagttatttcccagaatcttccatgaccacacattcacattgtttcttacttatttcttctcatcaatgcacagagaaaaatgattgagtaattgagagttattttttttagcttctctgtttacctcacatattctgaattgagtggaaagaccattaagaacatgccttcattgttatcagtgcatccaggtgaacctggatttttttttaatgtaactatgctagaaatgaaatactggaacgggttagatattaaaaagttcattttgtgttcccctggcagtatacaattatatcttgtaactttctacattcaaagaattttaatacatcctactttttaaactatatggatgtaatatttatgtctttctttgctgatgtttaaaatgacttctctttataaaatgatgacagcaaatggtagatttttaggttttgagttttgctttttaaatgccagtgacttggcagtataaaaagctgacaaccctaaaatatgatcctttaaatttttgctagttcatacaacccagaactctggaaactatagttgtttaaaagaatgactttcagtatccctcacaatttggtcataaccctcccttccagacccaactagtctttatcttcttgctataaaaaaacatttcttaaacatgtaaagaagttacatactatcacatttccttgtttttgtacagctcttctttctgcatttaatcctttttgttttgttttgttttgttttgttttgttttgttttgttttgttttgttttgtttgagacggagtcttgctctgtcgcccaggctggagtgtagtggcactatcttggctcactgcaagctccgccttctgggttcacgccattctcctgcctcagcctcccaagtagctgggactgcaggtgcctgccaccacgcccagatatatatttttttttttttgtatttttagtagagatggggtttcactgtgttagccaggatggtctcaatctcctgacctcatgatccgcccgcctcggcctcccagagtgctgggattacagccatgagccaccccgcccggcctaaaccctttttttttttaaatctccccaaattatactcatcctttgagtccattttcaggctcattaagcaaattaatgtcatgacttatgtgctcctacagtattttacttacataatattaataaaattattttacacttattgaaataggaaatatcttattgtttatattgtcattacctaacttagactctggtacatcataaatattcagtgtttttcccttgtgtttgcataggatattatttttctttcttgggaggcgaaagcagatgtattgcttgaggccaggagtttaagaccagcctgggaaacatagttagaccctgtccctagaaaaaataaaaaattactcaggcctggtgacatgtgcctatagtcccagctactctggaggctgaggtgggaggattgcttgagtgggagattgaggctgcagtgagccacgatcgtaccactgcactccagcctgggcaccggagaccctgtcgctaaaaagaaaataaggaaggattggtaagattttatgttctgtggtaagaactcctggtattgatcagttcttcagacctaggagtttgctgctgcactcatccaaggtccatacttgctctccaccccagcctgtagaaatgtatgtccttttattttctcattcttgagcatgtactcttactcattctttgttcttcgctctccttctgtttcccttctttctctaatttgatatgcttttcctttcccttgagaagaaaatgtatcaaagcattatgaagaactcaggacatttacatgataaaaacatatttaccctagctttgaatatttccatttaagaaatagtgcttatgatgaataaatctcactgcatttcaatttaccatataaatatgtgtgtgtgtggtaggaacaaaactgaatttaggtaactgaagatactttaatgtctatgaaaagaaaaagcaattactcttttaacttcaaatagccataaagtatatttgaattgcctctttattttatgttttatattccatttttcttaaggcacacatttatttttgtttaaattatttcttatgggataattaatccttggcagtttttattgtcggtgtcctttcattttcttaattatctattactttgattagttagcttgtgattgtatcattctagaacaatgtagttcaccttttaagaccattcattaacagtagctatttttaggtagcttttgatgtgtgttttctcttagcaataattaaggatttttgaagacagtaatttgaagcttactgaattttaagaaaattatgggttttcaatttataaactaatgcataaaaactacttagaataggtatgtatgcaagtatcaaaacctaccagccaaagataacaaagctgcctaagaatccagtttatgttctgtgagcattgtttatgttctattgggagctcacagaaatattcagagtaacttagttatgatgcggatatagcagaaagtctcatatgtgtccaaggacaggaaataaaatatagttgatcttcaggcagcctggaaatgggagagaaaagtcagtaacaaagactactccctttgattcgcaaagcaactttatagcctcctgtcttttattctctctgtgtatctactcagtgtttttactttcctcccagaccaacttctcttgcttagtcatcagaacatctcttagcatagcaccttagccctgaatcttaatgcatttttaatgtaaatatcctgcatcatctaactatagtcacttaacttatcaacagagaatctgaatggcttagccaggcctattactttgttcctcctgggttaggtgtctgaccctgtcataatcagctaagcctgaggtgggatagaggtgtctgagatacatgaggctctcccttttaggctctatatacaagttgaaacattttagaaagagatgttagcagtgcaggaaatttcactgaagggtccactctacttttggtggcatcaataaatattttattaaaatcatataatactcaagaatatttatggtttccacgactagcattttttaaaagtatataaatatagcatgaaatttctaccttcaccaaagaggatatcactgacatattctaaaatgaatgagcctagtcaagaagctccatatcattcacagatcatttgtagtagcattataggcacataatcagaaaaacttgccgtatttttatttaaaaattatagactaaaatataatttcagaattattgtttttaaattacaataatacaaaaaaatgtacacaagaaaattgggtaaatggaaaatgctggcataatttttaaatattcctgatttcctccataaaaaatggatggaagaatagataatgaaacaataactacaagaacaatgaatggacatttacaacaaaactaggtgacaggtatctcattggaccccaaaatatgcctaggtggggaccatctagcttatagctacatgatatacatgatatcagcttatttgtggcaaggactcatggtggccatcaaatatagatctatttggagaattaactaaatgagggttatataggagaaattaaaggatatgactgcttattctgaaaaatttgaaaaatggggcagtaattatgttggtagtaatattatcgatattacaaaactgttatgtaatgttggataaagctgcttggtaattattaatattctaattattttatcccgtgttcttgaaaatcaggattctggctgaagaaaggcgatccagatataaaataggagagtttaagtaaaagcttttaatttggaatttgaattggacattttcatgtaaacttatgcatacatatgcatgtacatgcacacatacacgcatacccatattctataggtatatgtatactatactagtagccctgtctgttgttttgcctggacacaaaaaccaagtcagtagcagtgagtacacttagggtccatatttactattaaaatatcatttgccaatgaaagaaactgggactttatcatagagaaataagtgatgtcaaggctggggcaggaaatattaatcatttacctgcaacattttgtgataccacaaagcaaggaaggtatcaaatgttgtcagaagagctcaggagctaacttaaagaaattcctgttgtcccaagatggagcagtttgagcatccataaatctattaggttggtgcaaaagtaattgcgattttattagcaattggcaaaaatcgcaattacttttgcaccaaccaataataactgcaatgcattgaaacacctggatatgtttaaatctatgtattcgtaatgataatttagaaaatgattttgtcaaatttagagaatgatagagaacttactttgaaaactgataagaaaattaaaagaataaagtatttcttatgtcctttctttgtgaacggatcattgtattatgaagttattgaggggggatgttttgtttttacaaaaatatatcatctgataaatagtggtgggatatgtgagttagattatcgtttagcaccctttaagaatttaatagatctaagcttcaatggctgctaaactcacaaatagagagacagctagacaattagataggaaaaataccatcacctatcaagacggtatgtatgaatgaatgaataaaataaaagcacacctgattaaatctgtatattcaacgtgttgaattataccatgggaactcaataatcaaaattaatactggaggaaattctgcaatacaaattgagttggtctcttcaaaataaattacatggggaaaagagatataggaagaacctgtagcttaaaagagatttttttttaatttcaaaaatcaccaaaactaagttgtttgtagaaataactctatgatttaggtattaaaaactataatcaaaggcaaagtgattatcataaaaatcagaataatggtttgttataagtagggagagggttagaatgggaaacatggagtactcctgggatacgtggtaataatttatttctttagctatttagtggttgcaaggatgttcacttcataatagtttattaactgatgttttctgcagtttacttattaatattttgtaataaaatattttaatgttctctggagaagatataaaaattcttgaatgacgttaaagacctaaataatggtgaactatatcatattcatggtaggaaaactcatcacaaaaaagttatttcagtccatgttaatatatcaattttaataaaaatttgatttaaaataatttttaaattattttcatggaatttaataagctttatcttaaatttctgagcagaataaagggatgaaaaaatcgagtaattttggaaattaacaagctattatagttaaaacagcatagcagtagcacagagatagatcagtgtgtcagaataaatctccaagaacagatcccacatacatatggtaacattatgagacagagctccattgtagactggggagaaatacgtgaacagtggatctagatcaattggattcccttttgttaatttaaaagacaaaacaaagtggatctcttcctccctgaacaaacaaaagacactaccactgtggttgaaaatcaaatatcaaatgtttcaggagaaaaaaacataggaaaatatctgtaataccaaaggtattatgtaaactagatacaaaagcgtaaagtgtagagggtaaaaaaatcaccatattaaaactgttttgttttatcaaaacaacattaaaaagtgaaaagattgagagtaacatgagcaatatagtgactacaaaccttgaagtcctcattctcccaaagaaaaaatgaatgtacaaaaatacatggaccaaattagtgttgttagaaagctaataaatcaattaagattcattagatcagataagatgttgcagcaatgaagtaaacacctagctaagacagagctactcaaaacgttaggaaatccattgctattttgtttgcccttatcccacaccctcctcaacacagtgcagcatacatgataatgaggaaattgctcagttcccaattactcctttggggtggaagggaaagaatggaacttgcttgcaacattctcactaaagactgagaagtgactatattttttaaaagcccgaattttaacaaaaatagtacaacgcactcaaagaaagagagaaacatagttcatgcaaaggaacaaaacaacttccagaaaccacgtttaaagaaatgtcggcctctgacttcttttaaaaataatttaaaacaactgtctttaatatgcctatgagccaaaaggtagcagggactgtcaactaaacaaaattaggaaaaggttttatgaacacaaggagaatatgaacctaaagaaattatttaaaagcaaaaactaatttgaagctgaaaaccacaaaggaattaaaaaattcattattagggttcaagagtagactcaattagacagaagaaagaatcagcaaacttgaagacaggtcatatgaaattactgagctagaggaccaagacaaacagaatgaagaagagtgaacagagcctaaaggaccacatcttcagacagactaacataggtattatggtagttgcataaggaaaagaaagagaaaagggcagagagcgtatttgaaggaataatggctaaaaaacttctcaaattttaggaatcagacatacgaactgaagctcaacaagctcccatgggataaattcagacacatacagagacacattttaatccaactactgaaagtcaaagataatctcaaaagaagcaagagaaaattgtacatgtacaatgagcctctataagttatcaccaggtttctcagtagaatccatgcatgctggaaggcagtgggatgatatatttaaagtgcatgaagtaaaaagcaaaacaaaacaaaaagaaactatcaaccaataatactacctccagcaaaactgtcctttaaaaatggaggagaaattaagaattttccagataaacaagagctgagagcatttattactactagatctaacctacgagaaatgctaaagggagtccttcaacttggaaagagggattctacacagtaactcaaagccatatgaaaattaaaagttctacaatagacatattacaaatatgaaaactttattattataattttggttctactattcttttaaaagattaaaatccaaaaatgtaaaaacaaacctatgaatctatgctaatgggtaagcaatatataaagatatgacttgtgacataagtaacataacttgtgcagatgactgagctgtaaaggaataaagtttttatatgcgattgaagttaagttgttcagtttaaaatgaactgttataattttaagatgttttatgtaatccacatgataaccacaaagaaaatttctatagaaattacacgaaagaacaagagaaaaagcaaatcacaacaaaattcaactacacacaaaggagggaagtacgggaagaaataagagacaaaaatacaatgacatacagaaaacaacaaattaaaatagttcttcctctttcagtaattattcaggatgtaaatggataaaaactcctcaatcaaaagacatagattagctgaatggataaaaaatcaggaaccaactatgtgctgtctttaagagacactcactgtaaatctaaggacacatagaagtttaaagtgaaagagtagaaaatgatattctgtccaaatagtaaccaaaacagaacagggatgtttaatataagacaaaataagcttttgaaactgttaaatgagacaaggaaaacaatatataaggataaaagggttatacaaagaaaatgtaacaactataaatttatatgtaccaaacatgagagttcctaagtgtaagaagcaaatattgacagacttgaagggcaaaaaagttctgcaataatcgtgggagacattcatatcccaatttcagtaatggataaagcaaccaggtaaaaggtgaataaggaaatggatgacttgaacaacactatagatcaattggacttaacagaccaaagaatacttcacccaataacatcagaatatacatttttctaaaatgcatatggagcatcctctaggttagaccatatgttaggtcattaaacaagtcttaatacattaagaccatatgttaggtcattaaacaagtcttaatacatttaaaactattaaaatcttacaaagtatcttttctaatcacagtggaatgaaactagaaataaaaactagaaggaaatgtagaaactccataaacacttaaaaataaaacaacatattttgaataatagaaataaaaagtagaaggaaatttagaaactccataaacacttagaaataaaacaacatattttgaatatgccactcaccttataaaaaaatcaatatttttttataaggtgagagatgaggatcaagttttattctcctacatgtgaatagccaattatcccagcaccatttgttgaaagagtatcctttccccactttatgtttttatttgctttgttgaagatcagttggctgtaagtatttggcttcctttctgggttctctattctgttccattggtctatgtgcctatttttataccagtaccatgctgttttcgtgactatggccttatggtatcatttgaagtcaggtaatgtgatgtctccagattgttccttttcgattagtcttgctttggctatgtgggctcttttttggttccatataaatttgaggattgttttttctagttccgtgaagaatgatgattgtatttcgatgggaattgcattgaatttgtagattgcttttggaagtatggtcatggtcattttcacaatattgattctacccatgcatgagcatgggatgtgtttttgtttgtttgtgtttatgatttccttcagcagtgttttgtagtttttcttgtagagtactttcaccttttggtattttattttattttttgcagctattgtaaaggggttgagttcttgattagattctcggcctggtcactgttggtgtatagcagagctactgattcgtctacattaactttatatactgaaactttgctgaattcatttatcagttctaggggctttttggaggagtctttaggtttttctttagggttttcagcaaacagcgacagtttgactttaccaatttagatgccctttatttctttctcttgtttggtctgatataagaatacctactcctgctcacttttggtgtccatttgcatggaatgtccttttccacccttttaccttaattttatgtgaatccttatgtgtcaggtgagtcttttaaaggcagcagatacttgtttggtgaattcttatctattctgtaattctgttttttaagtggagcatttagaccatttacattcaatgttaatattgagatgtgaggtagtattccatttattgtgctatttgttgatgaatccttttttttgtaattttgttttataggttatgtgagattcatgctttaaagagtttctgttttgatgtgtttccaggatttgtcaagatttagagctccttttagcggttcttgttttgctgtcttggtagtagagaattctctcagcatttgtttgtctgaaaaagagtgtatctttcattcatttatgaagattagtttctctggatacaaaattcttggctgataattgttttgtttaaggaggctgaagataggtttccaatcccttctagcttgtagggtttctgctgagaaatctgctgttaatctgatatgttttcctttataggttacctgatgcttttgcccaacagctcttcaaattctttcctttgccttgactttaggtaacctgatgacagtgtgcctaggtgatgatatttttgcaatgaatttcccaggtattctttgagtttcttgtatttggatgtctagatctgtaccgaagctggagaagtttcccccaattattcccctaaatatgttttccaaacttttagatttctcttcttcctcaggaatgccggtcattcctaggtttggtcatttaacataattccaaacttcttggaggctttgttcatttttaaattcttttttctttgtctttgctggtttgggttatttcaaaaaccttatcttcaagctctaaatttgtttcttctgcattttcaattctgttgctaagagtttccagtacattttgcatttatctaagtgtgtcctttgttttctgaagttgtgattgttttttatatatgctgtgtatttcactgaagatttctcttgtcatatcttatatcactttttcaatttccttaaggtagacttcacctttctctggtgcctccttgattagcttaataatcaacctgaattctttttctggcaattcagggatttcttcttggtttggatcttttggtagtaagctactgtgattttttgggggatgttaaagacccttgttttgtcatattacgcaaattatttttatggttccttcccatttgggtaggctttgtcagagggaagatctggggctcaaggctgctgttcagattcttttgttccacgcggtgctcccttgatgtcatattcttccccttttcctagggatgtggcttcctgctagccaaactgtagtgactcttttttccctctggatccagccacccatcagggcttccaggctccaggctggtactgaggtttgtttgcacagagtcctgtcatgtgaaccatcttcagttctctcagtcgtggataccagcacctgctccaatgaaggtggcaggggagtgaaatgtactctctgaaggtcctcagttgtagttgtttaatgcactagttttgtactggctggcaggaggtggtgctttcaagagagcatcagctgtgatagtatagggaggatcaggtggtagtatagggaggatgggcagggccctagatctccaaagagaatatgatctttgtcttcagctaccagggtgggtaaggaaggaccatcaggtgggggcagggttaggcatttctgagctcagactctccttgagctgggcttgctatggctgcaatgggggtgtgtggttcccagctcaatggtgttatgttcccaggaggattatggctgcctctcctgtgtcaagcaggttgtcagggaagtgcaggaaagccagcagttacaggactcacccagttcccactcaacccagatggccggtctcattccaaccatgcctctcccaacagcatcaagtttgtttccaggcagtgggtgagcagggctgagaacttaccccaggctaccggcctcctggcccagaaagcaagcagggcttctgcgtctcctgcctgtcatgtcttcacactgaattcttgccttcccccaagttctgccaggaaacttcacattcatttggaattgttacaaaattcagctggaggtttccttctccctgtagtcttttcccagttcctctggcagccctccccaaagaccccagtgagacacattaggaatggcttccctggggacccagagaacccacagggcttttccctgctgtttcctctaccctgtattttgcttggctctctaaattgtctcagtttcaggtaaggttagaatcttttccagtgatctagaccctcacgttccccagtgagggtgtgcattcaggggcagatgatccccttttcccactttcacagtttggacactcacagtgtttgggctgtctcccaggtcctgcaggagcaatccacttccttcaaagggtctgtggattctctcggctttcttggcatattcatcttgaagcaaaagttgataatgtgagtctccacattctgctctgtctatccaagtagaagctgcaatttagtcttgcctcctatctgccattttttcatctcccccaaaatagtttattttattaaaaagatcaacaaaattgaaaaacctttagcttgatttagggaaaaaaaaagaagattcaaataaagtaaaaaatgaaagagtaggcattataaccaatgccacagaaatataaaaggattgattataagagaatactatgaataactttatgccaacaaattagatacatagaggaagtgagtaagttcctggaaccacacaacctacccagatgaagaaacaaaccatcaacagacctacaacaggatagaatatttgcaaactcataatataaggtcagcattgccctgatattgaaactagatgcagtactaaaagacaactataaaaccaatatccattgtgaatattaatgcaaaaatcttcaacaaaatactataaactgaatttggcaacatattaaaaggattatataccataaccaagtaaattttattactgaaatgcaaggatggttcagcatataaaaattgatcaatgtaatacatcacacagaatgaagaaaagaattacatagatcatcttatttaattagtttactgtgtggggaaaaaaagccctcttaaaattcatatggaatctcaagagacccagaataaccaatacaatcttaagaaagaacaaagctgggggactcacaggaccgattttaaaacttctacttacatagctccacaagtcaaaacaatgtggcactggcataaagacatagtagaccaacggaatagaatctctagccaaaaacaaagcaaaacaaacaagcaaacaaataaacaaacaaaaaaagccagcccttacttatatggtcaaatgattttcaacatgggtgccaagaccatttaataatgaaaggacagtcttgtcaacaaatcatgttaagaaaacttaatatccacatgtaaaggaatgttgttgggcccttacctttctccatataccaaaattaactcaaaatgcattaaaaacctaaatgtaacacccaaaactgtaaaacgcttggaagaaaacaggataaaagcttcatgatggccgagcgtggtagctcatgcctctaatcccagcactttgggaggccgaggcaggcagatcacctgaggtcgggagttcgagaccaccctgaccaacatggagaagccccatctgtactaaaaatgcaaaattagccgggcatgttggcatattgctgtaatcccagctactcaggaggctgaggtaggggaattgcttgaacctgggaggcggaggttgcagtgagcagagattgtgccattgtactccagcctggacaaaaaaagtgaaactccatcttacaaaaaaaaaaaaaaaaaaaaagcttcatgacattgatgacattggatttggatttggcaatgatttctttctaaaatcagaaatataggcaacaagtaaaaatagatatattggactacatcaaaattttaaacttctgtgcatcaaaagacacaatcaacagagtgaaaggcaaaggcaacctatggaaagggagaaaatattgcacattatatatctgttaagagcttattattcagaatgtataagaactcttagagttgaacaataaaactacaaataacccagtttaaaaatgatatagtcaaaagcacaagaagaaaccttacactcattaagcacaagaagaaaccttatacccattaagcacaagaagaaaccttacacctattaggatggctgctatcaaaaaaacagaaaataataaatgttgacaaggatatggagaagttgaaaactgtgtactctttgtgggaatgtaaaattgtgcagccagtatggaaaacagtatggcattttgtcagaaaataaaaaatagaattaacatatgatctagaaattccagttctgggtttatagccaaaacaacttaaagcaaggtttcaaggaaatattatttgcgacctacatttatagcagcagtattaacaaatggtcaagtcgtggaagcaacccaagtttctatcaacatatagatgcatttcaaaaaatgtagtatatacatacaatggaatggtattcacttaataaaaaggaagttctgacacatgttgccacatgaattcaaccttaaggaaattatactaagtaaaataagcaagtcacaaaaacacaatactgtatgattcacttacacaagttatctagagtagtcaaattcaaagaaatagaaagtagaatgttatttgccagtgactgggggtgatgggaaataggagttgtttaatggggtatagagtttcagttttgcaagatgaaaaacctctggagatgtgaatatatttaacactactgaactgtgtgctttaaaatggttaagactaatttttatattatgtgtattttactacaattttaattaaagtgaaaagtttacccatagactggaaaggtatatgtctaacaatgataatcaacaaatgttgatatctagattacacaaagaaactcctaccaatgaataagaaaagcacaattctatagaaaaaatgggcaaaagaataaaaatctgttaatttgtggatgggttaaatacaagcagtcagtaaacatgtaaaaaaaagtcaacctcatttgcaatctcataaatggttaataaagccaaaatgaaacaatttcactcccatccaataagtataaaatttatacttaaaatccatttattaggaaaggtgtagagttttctagtgggagtctaaattgatgaaaccactttgaggaataattttgcattatcatgtaaagttgaatttgtaaatgtacattgactcagcaatttcattcttgggaatataccatggaataatttttgcatgtgtacacaagaagatacagatgtaaaatgcttattaaaaacagtgactttacccaagacatactgagaacaacctaaatgtatattaaaagaaaattgtataattaaatggtatactatgcagtagtgaaatgggatttcacaaaaatgatatttaccataaaagcttaacacatggataaggatactgtatcttctttagggacacattcataagtgataaaaatataaatgccaatcaagatgataaatttacagtagttattacatctaggggaatggtatcagtgctgtaactctaacgttcatgggggatgcatgtggacatcagaatggaagcaggtgtaagggttccacagaagaaaacatggctgccaaagctcagcctggccttagccattgcacgaggcatggtgaactctgccttctataatgtggatgctgggcacagagctgttttctttgactgattctgtggagtgtgggacattgtggtaggggaggggactcactttctcatcccatgggtacagaaaccaatggcattccactgctgctgtcaaccatgcagtatgccagtcgtcgctggtagcagattcatagtatgccagcatccctgtgcatccgcttccagcctgtcactgccagcttcctcacatcctcaccagccttggagaggactccaatgactgtgtgctggtgttctgccatctgtcactacagagatcctcgtcagtggtggctcactttgatgctggagaacttatcactcagagagagctgttccccaagccaggtgagtgatgaccttgtggagtgagcagcggccacctctgggctcatcctggacgtcatgtccttgatgcatgtgaccttcaggaaggcgttcacagaagcagtggaagccaaacaggtagctcagcgggaagcagagatggccagatttgaggtggaaaaggatgagcagcagaaagaggcggctatcatctctgcctatgatatggctccagagcaactcactggtgcccggggatgactacccgatggagctgtacatgctcaaagccaccaagagcgttgcttaccagctcttgtgctctcagaatgttacccacctgcccacggggcagtccatgctcctccacctgctctagtgctacctgcacctccgcgggccaactgggccacagctctgatgattgttaacaccagccttccttctgctcccaccccagaaatcactgtgaaattttgtgattggtttcaagtgaaggaaataaaagtaaaatcactccagatctctaaatactctatcaaatgaagcactttcatttttctcacatccatctacttttttatccacttctgtattagtccattttcatactgctataaagaactgcccaagactgggtagttcataaaggaaagaggtttaattgattcacagttccaaatggctggggaggcctcaggaaacttaacaatcatggtggaagggaaagcaaggtaccttcttcacaaagctgcaggaaggaggatcgccaagcaaagggggaagaaccccttatgaaaccatcagatctcatgagaagtcactgtcccgtgaacagcatgggagaaatcacccccatgattcagtcagctctgccaggtccctctcttgacacttggggattatgaggattacaattcaaaatgagatttgggtggaaacacaaagcctaaccatatcaactcccctgccaaaaattccaaagtatatatgcagactggctttaagccccaattcggggcctgctggagctctggcctaggcactggcaattgtcataacaaaggtagggcagtgtgtgatcgactggggagcacagttgtcagcctgagtaatgtgtagcctctatcctgtccttgatggttgattaaagatttgaggatgatggatatgtagctgaaccgagaaggcaggcctcagttttactagctgtccctgcacagatgcagctgaagagaggtgctaaccaaggtcagagaggaagtggtctgtggtctgtctcttaccctaagagtggttctctctaacagtgtgaccagccaaagcaggtgtttgtaaagtgggcatggactgaagaatctgttcctgttgagctggatgggcctgaatgttgccccccaggtccctaaaacttgggatggacttgagagaggaggcctggaccaagatgtgagtcccattgaagacatcctctctactccccaccttggtctctctcaaatacccaacagaattccaacttgaaggattgcatcctgacagggctgaacatgcctgccgaggaagtatgcatcctgtgttcctggctcactcattcacagactgctcttctcaaaggctctgtgcctgtgctttgaaggaaacaaccatgggaagaaaacaaatgtgtgtaaactgctgtcaataaatgacacccagaccctcaaaaaaacccgaaaattggaaataaaatatatacccaggaatacttctttttattgtgcttcacttattatgctttacagatactatgttaacaaattgaaggtttgtggcaaccttgcatggagcaagtctactggcaccacttttccaaaaacgtgctcacttcgtgtctctttgttggcattttttagcaatggtatatttttaaattaaggtatgtactttgtgattgttagccatagtgatatcacacacttagtagattatagtatagtgtaacataatttttatatacactgggaaacgagaattgtgtggcttgctttatcgtgatacttgcttcattacagtggtcttgaactggaccttcagtatctctgaggatgcctgtatttttaaaactgtgtgttgatcatcattatattatggtgtataccaggtttcagccaactatgacctagcagtcaaatctgcttttgtaaatggagttttattgaaatacaggcaggccattcttttatgtattatctagattgtctttgtactacatgggagagttgattggtttcagcagagaccatgtagttcacaaagcctaaaatatttactatctgaccctttaaaaaattgcttacccttgatctatacttctatacgtttttgtaagtaagaagtattaagaaaaaaaaaagaacagaagaatggtatattggtattgtcattgtcatctgatatccttacacttttgatgaagttatgaagttctttcgtgatccaagttgaataaagttgatgattgctgggtatttagtcagggacattttgttggaaattagtcaactacattttttgtttctcctccaaactatagcagtatcatttatttcctaaattttataacatatttttgtacctacatccttatctaattttcagctgaaaaaataacatgatcttatttctcccacctttttggggaaactattataataatatatataagaactttgccccttgatgaaagcatttgattaatatttggtccaattttagccagaatcttcaggggtaatattcttactataaaatgcttaaaaaattaaaattatattgtaaaacttaaaacttttaactaagtttctaacatttttattttttacttttttttttttttttttgagacagggtcttactctgttaacaggctggagtgcagtggcatgatcacagatcactgcagccctgaactccttcgctaagttgatcatccagcctcagcctagcctgggacaacaggtgtgcaccaccacactcagctaattttttaaaaaattttttgtggagatggggtctccctatgttatcaaagctggtcttgaattcctgggctcaagcagtccttccacctcagcctcccaaactgttgaaattacaagcatgagccaccgtgccaggcctatttcttacttttgatagcagtattagtatatacaatactttaattttgttcctattttaaaaattttttttcaagataaagacagtttaattaactatataataacttctggaatactatttttagttcaaattccgttatctaaatttaaaagcacttaaagttgatacagcaaatatacctcattgttatatccaaaatttcaaattggtaagaataaatctatgaactggattcttagaaatattctcctttttattgttacattaaaataatatttttttaatataaaattattttgaagattatttctccatagggaagtattatataaataacaatttaatgggaataatacaataagattagtttctgttactaaagttttacctgttgcttgtgaaaactaaaaaataaaatgcgattttgtttcacagtaatattaggttatcaaatttattatttaatgaatcgacctcatgttgcttggctatcagggataaaaggtatagagtaccattaccaaactctaaaacattacttatttttttccccactgaatggttatacttagtcactaattttggaataaatagggactgttgcgaagcatcactttcattctttccatattgaattataacgtgatattgtcatgggatccttggggtgtcactttgccagccagaaacctctgtggctagtggcacttttccctgagttttgctcaggcatgctgggctcattccgcccacttggcctgacatgctgcactcagctcatgctgctggcctagatcccatgcgagccaggcacagagcagcagtgggtgcatgagcgggcaagcgcaggttccggccactgtgcacaaccaggcacactgactgctgcagtggggtaaaaagctctaggcactggcacaggcgctagcttcatgcaggcctgcagctagatcaggtgcatcatacgcagcttccactgcaggcacccatgtctggatgagggcaagatgatagcacctggaagcttggagacgccagaaattacagagccccagaaagggtgtcacagcccaggcttggggagcccctaggtctgggctccctgagtcctgcagctgttctctcctcatcacccacagtgtggtgagcgggggtgggaggattgtttcagccctgtttgtgttacagcttttcagtcccaccatttggtgagtcccaagttcttgacccatgttcaggaagaatgagatatgtggacaactagagggtgagcaaggtggagaggagcttcactgagtgacagaacaactcttgggagacccaaagtgggtagctcctttccgcaggcaggtcatcccagtgagtgtccagctgtcagtggaaaggatacctggagtgagtagctcctttccacaggcaagtagtcctgacaaatgcagccctcagcagagaggagacccagagtgggtagctcctatctgcaggcaggttgtcccgataagtgtcccagctctcagcagagaggagacctgcaatgggtaactcctatgcacaggcaggttgtccctatgaatgtccagctctgatcggagaggagacccatagtagaaagctcctttctgcaggcaggtcatcctgacaagtcaaggagacccaaagtggatagtttctttctgcagctggtagtcatgatgtctgtgtaagtctggctggttctggggtctttatgggctcagaagggaggaagctcatgctgactggtctttgggaggccatagacaggcctgaaaaaatcaccataagttctcactctggactgcagactatacccagaactgagagcctggttcccaggcttcaggccattcctggcttgaaggtggagcttcaccagggtcccacccctttctgcccaggagcctttcttcctcctacgccgtcaacatgatatccatggcacccaggctgttcatgccgaggggcgcctgcaggctcacgctaagccatcctcagtaccctctcagcctccctcctgtgctctttggcacccaatgtctggagggggccaaggtgataaggctggcatgtcagcaccacccaagcatgtgcacgcccagctaggtcgtgacaatgcctgggtgtggccacaactttgctctgcccaggagtgggtgccaggagtagggggagcccaggcagcgggagcaaacactttcaagcctgtgggggcaagggcttcctgcacccccaagagtgcaggtatgccagggtctggagccatggctgggcagctgcagttgcacccgggagcctgggactcctgccctgccaactcaatagtggagggagctcccacctgttccagcccccacctagtccatgcagcccacagccctggccatgcctcccccactgcagttggtgtctttgtagtggccactccagatgggccactgctgccatcaatgtcactttttaaaagtgtgtgagagaaaggaagtggatagagtattacagagaaaaattatagataggcaaaatctgttaaagagcatggcagcttgatagaattatagtagtaaagtggataagtttaacttgttagcatttttatatgaggcatgtacaggtcaaattgtcattaaatactgtttgtggaaaaatatgtttttggatgctaactgttctgaattttcctttctagttttgctaattctattggtattttgaaatctgtttaaaatattttatatatgattaatttctgtactactcctgggaggtaacataaaatagtcacctaactttgatcacaaaatttattaaaatttgcattaattaagagcagcaatgtaaatgactactatggttatgtttactatttgagatatttaaaaaatacttcatgtggttacagtttccatttttacacaaatttgagcttataatatatacaacatgatggtatgacatgaagaaaatggaaaggaaacttagctatgttcaataatctaatgaaaaaaatattttggaaaaagttgtatataagtggtaaactatttgaaaatcattcttaaaaaaatttatttcctgctttttaaaatgtgacagactccacctttctatatcctgttgggccatttgtccctgtgcaaacaaaaattggtaattttcatatagatctgattaacaaaaataaatttaatgaagtctgacatatgaaaggaaaatgctccagtttttttcttacttgagtgaacagttttttcacaatctaaaatgagttaactcatacaggaaatttgaaagactcttcatgttttatgtctctccaaaatggaattttgactcacttttacaaaagattttaatatttattatttttatttgtaatgaactttacatataatacaaattttcattttatagatttttacattttattttgttttcctaatgtttcatgaattggaagtactgtaaaataaggttttgcaaactttttctttgaaggtttgggattgttagccacacagtctttgtcatttttttttttttttttaaacaacatctcgctctgtcaccaggctggagtgcagtggcgcgatctccactctctgcaacctccacctcctgtgttcaagcgattctcctgcctcagcctcctgagtagctgggattacaggcatgcgccaccacacttggctaatttttgtatttttagtagagatggtttcatcatgttggtcaggctggtctcgatctcctgacctcatgatccgcctgcctcagcgtccctaagtgctgggattacaggcatgagccaccatgcccggccatattttctggtttttgtgttctcttatttttatgatccttaaaaaccataaaatctgttcttaatttactggccataaaaaaaaaacagtggcagaataggtttagcccatccatagactacagtttgtcaaccccattcctagaataagaagtaataacatcatcaacagaaaaattaaatttagatactgttgataatgttggtgtttatttttcatttaattggctgtgactattatactacatgatgatgtaacttgtaaatctcatatgatatctgtacaggcagtccttgacttacaatgatttaatatgattttttaaattttaatgatggtgcaaaaacggtatgtattcagtggaaactgtacttcagtacagcattcaataaattacatgagaaattcaacatgttaccataaagtaggatttgtgttagatgattttgcccccaaatagggtaatataagtgttctgagcatgtttgaggtaggctaggctaagctatgacattcagtaggttagctatattaaataaattttttacttaagatgcgttcaacttacagtgggcttatcagtacataaccccattttaagtcaagcagcatttgtggttcctttccatgctaagcacttacaagcttttccttaataaatggttatgggaagttagttttctccattttgtttattatctggtgtcctgaatacctgttcttgaaacctttgttttgaaataaatttcattttatttttagctcggcaccagactcaactggtaaaatttcctggccatctaaatttattactatgttgtttaataatgaactacattgactgcagaaagcatttatcttcctatttttgataactagttttcatcaattttgttaacaggtatcattttcagttatttgcataatttctgcctaactagcagtgagcagctgtagttcctagagttgttattagttatcttgtttaaagaaaatggtcactaacactttaaaaatattttacagacatacaccagtgatgttttgtgtaacatttcaagtttttgtaaatgatagattctattttcacattaggggaaaaataattcacttattttgctaaatctcacaaaaacttatcaatctaaaatcaatcatttttaccctaaaaataaaacattttattagcaattttaaaaaatatattataattattctttagagatacctattggcatatgaacagataatcatttgaatttttacaaatatagttaaatgatatttcatcaaaagatctcataactttcaaaaagccactgaaattttttaggtatgtaagttatttgggttctcaaatggtcaagattttgtgttacaacataacttcaatcaaagaaatgttatttcaggaatgatatttaaaatatagaatatttggatagtcatcaagatggaaaaagatggccagttgattagttgcatcagcttactcaacattgacaatcagtgctttaacaattgatggctacattgccttcacatagaaattataatccaatatgaagatatggttatctttaatatctgtaacatagtattttgtatacaatcaaggattttacttcaaacacgtaagatcatgtccacacttcttcgtgctttcagagatggggaaatcaaactaaaacccatgaaataacaaagtcagtctttagccaaggttaaagcttctttagtattgattgaatataaggccctacacaggatattgacaggaacagggaaaaagaggcagtgacatagtgttttgaaagaaaattctaaaagacatactttgatttcttctttttctcatgatggcataacaagaagtagccttattaataatttccaattataatcactagaaaattggacaaaatatatgaataagcagtttttatacattgaacagtaggcctcagataactgtgaaccatgagagaacagaaataattgagttgggctctttaatttctctgatttgcctggaggcactttctggattgtagtacaagaaagggaatttccagtaaatcacagcactcttgctgagttgaggagacagtgatcagagttcaggaagttatggagcagaattttgtggaagaggaagcatcacagtaaaatagcttgagaaatctgcctataagccccttgaatcttgaattttttgagatgcatatgtaaagggcaaaattccacaagactgggtaaaatatgaccgtggacctttagagcaagaaatttctagagctcacagagctgaaagtgtttttctatctctaatcagccagagtggctaatcctaattgatttcctgggacagagagtagacagtccagaagagtggcacattagtagtagagttaaattatttctagagtaaagggttttctagaaccattcaagtctaaatctgatctaaaagtatcttcaaaataggcctcaaatgaccaaattgtttcgccagtaactcaattatgagaacaaagcccaacacattttaaaggaatacagcaaaatgcaaacacttaatgtaatactcataatacccagcatccaaacataattactagacatgagataaagcagtaaaatgaagcacattactgaaaggaaagtcagttgtaaaactttctgggaaatgacagggataaggggtttaaaagacaaggattgtcagctactataaagatgtttaaatatttaaagtaaaatatgggccaagtgccatggctcatgcctataattccagcactttggcaggctgaggcgggtggatcacctaggtaaggagttcgagaccagcctggccaacatgatgaaaccctgtctctactaaaaatacaaaaattagctggacatggtagagcatatccgtagtccagctgctagggatgctgaggcaggagaatcactggaacctgggaggtggaggttgcagtgagccaagattgtaccactgcactccagcctgggcaacagagcgagactccatctcaaaataataataataataaagtaaaatatgaatgtgaagtgaattggacaatgtaaaaaagaaagaaatggaactctggaaaatgaaaaataaaggcctaaaatgaaaattcatttgatgacttgagccgaatattttatactgattaagaaatagcagtgaactcggagatgtagaatagtatgtttccaaactgaagcagagaaaagacgaaaaaagaaatggagaccagagccatagaaacctattacataaatcaagcagtttaatatacatggaattggagttcaaggaaaaggggttgagagtggaaaataatacccaaatattttgaagactataaatcctaatatccaagaaattcagctaaccatgagcaggattaacacaaataaaaattaccacgtaacataagtaaagtgtttaaaagcagtgttaaacagcaaaatttcaaaaaactcttattagcaagagacaaatagctagttcacttaacagtgacttgaaaagacacttcaccagtgattatattaaatgccagatgagcacatagaaagatggccaacatcgttagcgatcaggtaaatgcaaattaaaaccaaaattaaatacctctacaaatatatgagaattgctaaaataaaattactgacaattccaagtgctgccaagaatatgcagcagctggcatctcatccatggttgtcatccatggctttgagaatgcaaaatagtagccatagaggaaaatagtttggaagtttcttatttagttaaacaaactcttaattatatgaccgagtaatcccatttctgagtattttccctgaagaaatgaaacttatgttcacacaaaaacctataaatcaatgttcacatcagttattggtgtaatagtcaagagatggaaaaacacaaatgtccttcatgaataaacaaaccatgatttaaacacaggaatgctactgaacagaaacaaagggccacacttataaacctgactatgtagatgaactcaaagacattattacaatgagttttcttgtgagtaagaaaactcatttcaaaaagttacatattgtgtatttccttttttgggggaaattctcaaaataacaaaatcatactgatgaaaatggattagtggtggccaggagttatgggtgaggttaagacttccaaggattccttcaggcagtggagctattgtgtgttgattgtggtggcaaaacacagtgcatgtgacaacactcataaaactacacaaatactgataaaagacttgtacaatgaaaggtacaaaccactgctgaaagacattaaaggcagaaataattagcaagctattccatgttcatgggttggaagagtttacgtcagtcctacccaaagcaatttatagattaattgcaatttctataaaagtcccaataatgtgttctgcagaaatagaaaaatcaatcctaaaattcatttgcaaacttaaggaaccctgaataaccaaaataatcctgaaaaagaagagcaaagctgagaggcacacacatcctaatttcaaaacttgcaacaaaggtacagtaatcaaaacagtgaagtactggaatgaaacagacatataaaccaatggaatacaatctctagcccataaataaagtctcctatatacagtcaaattatttttgacaagagtgccatgatcattccctgggaaaaggcagtcttttcaacagatgggaaaagtggatatccacatgcaaaagaatgtagctggacccttcactaacaacacagacagaaaagatagactgcaatccaataattgtagcagactttatcagctgacttttagcaatggagagatcatccagacagaaaatcaataaggaaacattggacttaaactgtactctcgaccaaaaggacctaaccgacatattgaaacattctatccagtagctacagaatacccattcttccccaatccacatggagcattctccagaatagaacatgtatcacaaaacaagtcttaacatatttaggaagactgaaattgtatcaggtatcttttctgaccataaaggaataaaagtagaaattgaaaacaggaggaacaacttcagaaaaatcacaaatacatggaaattaaacagcatgcttctaaacaactaatgggtcaaagaagatattaaaagaaaaactttaatatttcttggacaaacaaaaatggaaacaacataccaacacctatgagatacagcaaaaggagatctcagagggaattttacagtaataaatgcctacatcaaaaaagaagaaagatctcacacaacctacagtgtacctcaaagaattagaaaaacgagaaaactaagcacaaaggtagtagtagcaggaaggaaataataaagatccgagcagaaatagatgaaatagagactagaacaataggaaagattgacaacacaaagagttgttttttttttaaagaaaaactttacaaaccattagctagactaagaaaaaagagaagactcaaataaaatcagaaatgaaaaaggagatattacaactgataacacagaaatacgaaggacaacaagagactattatgaataactatatgccaacaaatcggataccctagaagaaatgaaaaaaaaaatctagatacatacaatctaccaagattgaatcatgaagaaatagaaaatctgaacagatcaataatgagtagggatcaaattagtaataaaacatctcctatcaaagaaaagcccaggatctgatggcttttctgatgagttctattaaacaactaaagtgtttatactcatctcaaacccttttaaaaaattgaagaggaggtaatatttccaaacacatattacaaacccagcatttccttgataccaaagccaaagacattatgaaaaaagaaaactgtaatacgatatccctgatggacatggatgcaaaaatctgcaacaaaatactagcaaacccaatttaacagcacgtttaaaagatcagtcaccatgatcaagtgagattcatcctagggatgcagggatagttcaacatacattaatcaataaatggtgatacatcacaataacagattgaaagacaaaaaccatatgatcatttgaatagatgaagaaaaagcatctgaccaaattcattgtttttgcatgatagaaagtctctacaacttcagaaggaatatacctcaacacaataatgggcattctgacaaacacgactagcatcatattcagtggagacaatttgaaactttttcctctaagatctgagagagaacaagtaaactcactctcttcacttctgttcaacgtagtagaagtcctggacagaacagccaggcaagagaaagaaataaaatgcatccaaatgagaaaaaaaaaatgttaaattgtctctttgcagatgacatgatcttatatgtagaaaaccctaaagaatcctccaaaaactattagaactaataaatacatttagttaagttgcagaacgcaaatcaatatacaaaaaatcaatagtgtttctatacattgacagcaaattatttgtgaaagaaatcaagaaatcaataatatttgcaattgcaatgtttcctaagtaaaatgcttaggaatgtgtttaaacaaggaagctctctacctgaaaattataaaacatagatgaaagaaatggcggaagacacaaataatgaaaacccatatggatcatgggctgaaaagttaatagtattcaaactacacaaagtgatctataaattcaatgcagtccctatcaaaataccaatgacattcttcacaaaagtagaaaaatcatttctaaaatatgtatggaaccacagaagaccccaaatagccaaagtaatcttgagtaaaaaaaatttgaggcatcacattagctgactgcaaaacatactacaaagctatagtaacccaaacaacatggtactgacataaaaatagacatacataccaataggatagaaagatagcccagaaataaatccacacatttacaactaactgatttttgacaacggtgcctaaaaacagtggaggtagggagactcttcaataaatagtgttgggaaaattggctatccatgtttagaaaataaaatgagaccctcattttacatcacacacaaaaatcaactgaaaatgaattaaaaacttaaatgtaagacctacaactatgaaactactagaagaaaatatagtgagaaatctccatgacattggtccaagcaaggatttttggatgtgactctaaaaacacagacaacaaaagcaaagacaaatgggattgcatcaaactaaaaatcttcggcacagcaaagaaaacaaacaacagttaagaagtaatctacagagtaggagaaaatatttgcaaactatacatctaacaagtggctaatatccaaaatatataagtaacttaactaagccagaaaacaaataacttgatttaaaaatgggtaggagaactgagtagatatttctcaaaagaagaaatacaagtggccaagaggtatataaaagtaatgttcaacatcactaatcagaaaaatgcaaattaaaaccacaataagatatcaccttcctttttaaatataaatattaccaaaaagataataagtgttggcaaggatatggagaaaagggaacacttgctcactgttggcgggaatgtgaattaggatagccattgtggaaaacagaatggaggttcttcaaaaacctaaaaacagaactaccatatgatctagcagtttttctactgggtatgtatccaaaggaaattgaattagtatgtcaaagagatatctacactctcatgtttattgtagcattttttcacagtagccgagatgtgtactcagtttaagtgtccattaacagattaatggataaagaaaatacgctatatatacacagtggaatactattcagcataaagaaggaaatattttcctttgcaacagcatggaagaacctgggagacattatgttaaatgaagtaagccaggcagagaaagacaaatattgcatcatctcactcacgtgtggaatataaaaagttagactcataggtatagagagtggaatgttggttaccagggcctagggtagttggttatgggagttggggagatactgatcaatggatacaaaatttcaattagataagaggaataatttcaagaaatctatagtacaacctggtgactattgttaacaataaacagttatcccatgaacaactcagtgttcggggtgctgaccacgtgtgcagttgacaataccatataacttttcaactccccaaaacttaactactactagccttctattgacaggaagccttattgataacataaagtaaattaacacattttatatgttaatatgtactgtattgttaagaataagctagagaaaaggaaatgttattaagaagattataaggaagagaaaatatatttactatccattaagtggaagtggatcactataaaggtcttcaacctcattgcctttacattgagtaggctgtggaggagaagaaagaagaggggtttgtcttgctgtctcttgggtggcaaagacggaataaaatccatatataagtggacacaggcagttcaaagctgtgtctttcaagggtcaactgtattatatttttgaaaaatgctatgagggtgaatgtaaagtgttcttaccacaaaaataactgtgcgaggcaatgcatatgctaattagctagatttagtctttccacaatgtgtatatacttccaaaaatgatatttacaaaatatacaattttatctgtacattttttaatgaacaaaaatactccaaggagaaaagcattagggcattggatttggcaattatatcttggatatgacaccaatggcacagaaaacaaaagcaaaactagacaaattagatgtcataataattttagacttttgttgatcaaaatacattatcaacagagtaaaaaggcactccacagaaagagatacatatttgcaaatcttttatctaataagggatttatatccagaatatataaaaatctcctaaaactcaaccacaaaaaaaaactcaaaaaagcacaaaagacttgagtagacattttttcaaaaaagtacatacaaatggtgaataagcacatgaaaagatattcagcatcactagtcattagggaaatgcaaaacaaatccagaatgagatgtcacctcacaccattaggatgggtactatttaaaaaaaaaaaaagaagaagaaaaaacaataacaaatgttggtaaggttgtggaataacttaaacactgaactgttggtgggattttaaatggtacagctgatgtgcaaaccagtgtggtcgttcctaaaaaattaaaaatataattaccatgtcacctagcaatttgacttctgggtacatacccaaaggaattgaaagcctggtctcaaagagacatttgtatacacacgtgttcattgcagcattattcaaaacagctaaaacattgaaataacctgggtgtccactgatggaagaatgagtaagaaaaatgtggtacacatgcaggggaatattattcgcttttaaagagaattcgggcatataatgcaacatgaatgacccttgaggacattaagctaaatgaaataaacctgtcacagaaaggcaaatgatgtgtgattttatttatatgagggacatagagtagtcaaaaatcacagagacagaaaatagaatggtggtggccaggggctgcagggagtggggaatggggagttactgtttaatgggtgtaaagtttcagttttacaaaataagagttatggagatggatgatggtgatagttgtacattatgactgaacttaatacctctgccttgtacacttaaacatgattaatatggtaaattttatgttttatgtcctgtaccacagtaaaatattggaaaaaatatacaaacttagaattaaacaaattctattaaaaataacacaaacacgccaacaacaacaaaaaaccatgcagccctgttgcaaaaaatcttgaaaactgacccaaattttatctgtaatcttgcctctgaacattatcattttgtatattcatttccagtctttttttagtaaatatatttttatgtaggagaacaagtaaaaaggtccattttaatgtatgatcatttaaattttaagttttaaaaaatctgtcagaagaaaaatcacatcacttgcaaaaatagacagaaattatgcaagccagaagataatggaacatctttaaagtgctaaaatgatagactgccaacctgttattcttaattcagtgaaaatattcttcaaaaatgaaggtgagataaagactttttcagacaacaaaagctgaggaaatttattgccagcagatctgtattgtaacactgttaagaaaatggttttcaagcagagggttaaagataccagatggaaacatggacacatacaaatgaaaaaaggagtacaagaaatggtttctgtgtgaatattcaggtgctcctcaacttatgatggggttacatacccataaactctttttatgtaaaaaataacataagttgaaccatcacaagttggaggtcatctgtatattaaacattgttttctcatttttagtcgatgcagaaaatgcatctgttaatattcaatacctagtcataataaaatctcagaaaaataggacctgaagtgaaaaaaagctgaactaattggtatctaggaaaaaacaacttatgacatatttgacagtaaaagaccaagtaagattgggcaagagttttatgtctcattactttaacattttactgaatattctaactagtacagtaaatatgggggatgcatattccctcttactacatggaagtggtcaatattatagagaagtcaacagaaggaagattaggaacagaccacatgatgtcatcgttagaatctttgatttggagacagacctcagaagagtagtggaaacgaatatagaactgtagggtgtaaaatgtttgaataacaaactgagtaaacagaccattcgttggagaaatttgacaatgaaacaaaagaggaaaattggtggaggtttgtgtaactgttgaagattttattcatggaagggaaagctatgtttgtttggatatagaggaaaaagaaccattggagatgtaaaaatgaagattgacagagataagagaaataatgcagaaaagctgtcatgagttaagaaaggacttagaagaaatagagaagtttgctctggaggggagcaaggacaacttctaaacttagaaggataaattataggctaggaatagacatgggttgagggaaatgtaaatggaattttctctgtccattttatttattcaatttaccattcaggatattctaattcagttattacttgattttgtgtccaaaggatacctctttttgacttgacctgatgttctgagaacttctccaaattatttttttcttacaaataaatagaaattaagtagcccccaaagtaatccaaatgtttactaaatgtagaagttgacaaagatttttttcattacagttaaattctaccaataaaacaacctccacatagagaaattatactcttttgtcataaacaaacatttaaaactgcacagtttagtatttcaatatggaaatttccttttatgtaataaagatggttaatccaaagaagacatgatttgtcaagaagaatggttacagaccactttcaagatggctgagtgggaaaagctttggtctacaggtcccagcaagatttacgcagaagatggtgatttctgcatttctaagtgaggtacctcgttcatctcactgggactggttggacagtgggtgcagcccatggagggcgagctgaaccagggcagggtgtcgcctcacctgggaagtacaagaggtctggggatttccctttcctagccaagggaagccatgagtgactgtacctggaggaatggtacacgcctgcccaaatactgtgcttttccaatagtcttcacaaccagcagaccaggagactccccccgtgcctggcttggtggatcccacacccacagatccttgctagctgctagcacagcagtgtgagattgacctgggatgctggagcttggcagggggaggggcatctgccactgctgaggctttagtaggcaggtatatgctcacagtgtaaacaaagcagcagggaagcttgaactgggcagagcccaccacagcccagcaaggcctactgcctctctagattccacctcttggggcagagcatacctgaacaaaaggcagcagacagctactgcagacttaaacgtccctgcctgacagcaccgaagagagcagtggttccccccagcatggcatttgagctccgataacggacagactgcctcctcaagtgggtccctgacccccatgtagcctgactgggaggcatctcccagtaggggcctacagacacctcatacaggtggatgcccctctgggacgaagcttccagaggaaggatcaggcagcagtatttgctgttctgcagcttccactggtgatacccaggcaaacagggtctaaagtggacgtccagcgaattccaacagacctgcagctgagggacctgactgttagaaggaaaactaacaaacagaaaggaataacatcaacgtaaacaaaaaggacatccacaccaaaatcccatccataggtcaccaacatcaaagaccaaaggtagataaaaccacaaagatggggagaaaccagagcagaagggctgaaaattccaaaaatcagaatgcctctgctcctccaaaggaacacaactccacgccagtaagggaacaaaactggatggagaatgactttgacgagttgacagaagtaggcttcagaaggttagtaataaacttctccgagctaaaagagcatgttctaacccattgcaaggaagctaaaaatcttgaaaaaaggttagactaatggctaactagaataaccagtgtagagaagagcttaagtgacctgatggacctgaaaattgcagtacgagaacttggtgaagcatacacaagtatcaatagctgaatagatcaagttgaagaaaggatagcagcaattgaacatcaaattaatgaagtaaagcatgaagacaagattagagaaaaaagagtgaaaagaaatgaacaaagcttccaagaaatatgggactatgtgaaaagaccaactctacgcttgattggtgtatgtgaaagtgacagaaagaatggaaccaagttagaaaacattcttcaggatattatccaggagaatttccccaacctagcaagacaggccaacattcaaattcaggaaatacagagaacaccacaaagatactcctcgagacgagccaccccaagacacataattgacagaatcaccaaggttgaaatgaaggaaaaaatgttaacggcagccagagagaaaggttgggttacccacaaagggaagcccatcagactaacagtggatatctctgcagaaaccctacaagccagaagagagtggggccaatattcaacattcttgaagaaaataattttcaacccagaatcccatatccagccaaactaaccttcgtaagtgaaggagaaataaaatcctttacagacaaacatatgctgagagattttgtcatcaccaggcccatcctacaagagctcctgaaagaagcactaaacttggaaaggaacaaccggtaccagccactgcgaaaacatgccaaattgtaaagaccctcaacgctatgaagaaactgcatcaactaacaggcaaagtaaccagctaggatcataatgacaggatcaaattcacacataacaatattaacctaaaatgtaaacgggctaaatgccccaattaaaagacacagactggcaaattggataaagagtcaagacccatcagtgtgccgtattcaggagacccatctcacgtgcaaagacacacataggctcaaaataaagggatggaagaagatctaccaagcaaatggaaagcaaaaaaaagcaggggttgcaatcctagtctctgataaaacagacttttaaaccaacaaagatcaaaagaaacaaagaaggccattatataatggtaaagggatcaattcaacaagagctaactatcctaaatatatacgtgcccaatataggagcacccagattcataaaacaagttcttagagacctgcaaagagacttagactcccacacaataataatggaagacttaacacccaactgtcaatattagacagatcaatgagaccaaaggttaacaaggatatccagaacttgaactcagctctgcaccaagcagacctaatagacagctacagaactctccaccccaaatcaacagaatatacagtcttctcagtaccacattgcacttattctaaaattgaccacataattggaagtaaaacacccctcagcaaatgaaaaagaacagaaatcacaacaaactttctctcagaccacagtgcaatcaaattagaattcaggattaagaaactcactcaaaaccacacgactacatggaaactgaagaccctgcacctaaatgtctactgggtaaataacgaaatgaaggcagaaataaagatgttctttgaaaccaatgagaacaaagactcaatgtactagaatctctgggacacatttaaaggagtgtgtagagggaaatttatagcactaaatgcccacaagagaaagcggaaagcagaaaagatctaaaatcgacaccctaacatcacaattaaaagaactagagaagcaagagcaaacaagttcaaaaactagcagaagacaagaaataactaagataaagagcagaactgaaggagatagagacacaaaaaacccttcaaaaaaagtcagtgaatccaggagctggttttttgaaaagatcaacaaaatagatagactgctagcaagactaataaagaagaaaagagagaagaatcaaatagatgcaataaaaaatgataaaggggatatcaccaccgttcctgcagaaatacaaactaccatcagagactactataaacacctctactcaaataaactagaaaatctaaaagaaatggataaattcctggacacatacaccctcccaagactaaaacaggaagaagttgaatctctgaacaggacaataataggttctgaaattgaggcaataattaatagcctaccaaccaaaaaaaagtccaggaccagacagattcacagccgaattctaccagatatacaaagaagagctggtacctttccttctgaaactattccaatcaatagaaaaagagggaatcctccttaactcattttatgaagccagcatcaacctgataccaaagcctggcagagacacaacaaaaaaagaattttagaccaatatcctgatgaacatcaacgcaaaaaattctcaataaaatactggcctactgaatccagcagcatatcaaaaagcttttccaccatggtcaattcagctccacccctgggttgcaagactggttcaacatatgtaaatcaataaacataatccatgacataaacagaaccaatgacaaaaaccacatggttatctcaatagatgcagaaaaggccgttaacaaaattcaacagcgtttcatgctaaaaactctcaataaactaagtattgatggaatgtatctcaaaataataagagctatttatgacaaaccgatagctaatatcatactgaatgggcaaaaactggaagcattccctttgacaactggcacaagacaaggatgccctctctcaccactcctattcaacatagtattcaaagttctggccagggcaatcaggcaagagaaagaaataaagcatattcagttatgaaaagaggaagtcaaattgtctctgtttgcagatgacataattgtatacttagaaaaccccatcatctcagccccaaatctccttaagctgataagcaacttcagcaaagactcaggtacaaaatcaatgtgcaaaaatcacaagcattcctatacaccagtaatagagagccaaattatgagtgaattcccattcacaattactacaaagagaataaaatacctagaaatacaacttataaaggatgtgaaggacctcttcaaggagaactacaaaccactgctcaatgaaataaaagaggacacaatcaaatggaagaacattccatgctcatggacatgaagaatcaatatcatgaaaatggccatactgcctaaggcaatttatagattcaatgctattaccatcaaactaccactgactttcttcaaagaattggaaaaaaagtactttaagtttcatatggaaccaaaaaagatcctgcatagccaagacaatcctaagcaaaaaggacaaaggtggaggcatcatgctacctgacttcaaactatgctacaaggctacagtaaccaaaacagcatggtacttgtaccaaaacagacatatagaccaaaggaatggaacagaggcctcagaaataacaccacacatgtacaaccatctgatctttgacaaacctgacaaaaacaagcaatggggaaaggattccctatttaataaatggtgctgggaaaactagccatatgtagaaagctgaaactgaatcccttccttacaccttatatctaaattaactcaagatggattgaagacttaaaatgtaagacctaacaccataaaaaccctggaagaaaacataggcaataccattcaggacataggcatgggcaaggacttcatgactaaaacaccaaaagcaatggcaacaaaagccaaaatagacaaatgggatctaattaaactaaagagcttctgcacagcaaaggaaactatcatcagagtgaacaggcaacctacagaatgggagaaaatttttgcaatctactcatctgacaaagggctaatatccagaatctacaaagaacttaaacaaatttacaagaaaaaaacaaacaaccccatcaaaaagtggccaaaggatatcaacagacatttctcaaaagaagacatttatgcagccaacggacacatgaaaaaatgctcatcatcactggccatcagagatatgcaaatcaaaaccacaatgagataccatctcatgccagttagaatggcgatcattagaaagttaggaaagaacagatcctggggggagggatagccttaggagaaatacctaatgtaaatgacgggttgatgggtgcagcaaaccaacatggcacgtatatacctatgtaacaaacctgcacgttgtgtacctgtaccctagaacttaaagtataataatttaaaaaaagaagagatgagcacccaaaagttgtagatggcatatctgaacatctgctatagggctgactgaatacatgtaatttttagtcagtataagatgactttatcccttactatgaaatcaatcttctactttgatatggtgattagaagacacttttgttttacaaaataagagcacatatggcctgtgttgtatattccatgataatttttaaagggaattattttcccttttgttctaatacaattggtgtatttgtataaatttttaaatgcgaaccaggaaaataccaaaaaaaaagaggctatgtttagaattaccctcaggcatctggtgtgagcttggattgttttgacaaatcaagacatttgggtgcttaaaatacaaggtaatgtaatgaaaggtctatatattccattaaatttatgtcattgaataacaggtttggtttggagggcatacatgtaacttcttttgagacaagaaatatttttacattatgaaaaactgcatgctgactataatgtctactcatgataaactacatggaatcttcaagaagctaagcatggaattaatgttggcttttattattatactctctgggatactaatgcacgttagagaaatatgtaaacaacttgggaaaaaactaaattgggaaatttttaaaaaggaaatacattgcttagcacttatattgtagtgtttacattttccaagtaatttatatacttattacagacatactgtagttcctaaatgtgaatagactataagatactagcctgagtttatttagtagctgatggccttctgcccatcctcaggttgctctaagcaaagtccacgtttttttaattgaattctgattctttttgaatataaaatagattatacatttgtttaaattttgtaatattacattacatatttaaagaaaactttagagaacggtttactttttccttctgttttaacagagtaatggaaagcatgcatgcagaacaataacaatgcaacataagcatctgtggccccaggtggcagggatgtagagagaacataggagatacctatatgtaaaaattcagctagttatggacaagattcaacaaagctggtacttaccttaacactgctttgtttccaactatattcttaaaacaaaatttggtaaagtaaaaatacagtacatacacaaaaaaaccaaggtggatgacatgcagatcaggtttaaacctggcagagaccaggtattaaaggaagtaaagacatcagagagccagaaaaactcatatttgttcatgacttattaaaaatcacattaggccgggcgcggtggctcactactgtaatcccatcactttgggaggccgaggtgggtagatcacttgaggtcgggtgttccagaccagcctgaccaacatggagaaaccctgtctctaccaaaaatacaaaattagccaggtgtggtgtcacatgcctgtaatcccagctactcaggaggctgaggcaggaaaatcacttgaacctggtaggcagaagttgcagtcagctgagatcgcaccattgcactccagcctgggcaacaagaaagaaactccgtctccaaaaaaaaaaaaaaaaaaaaaaaaaagtgggggaaacaacatatgtatgcaaaggagggtagaaagaaaggagcagcgactttgccaaatacacatattctaaaggaaaaaaagaaacctagattctagtcattcttgaaaaaaatttgaatagaaagggacaaaattaaaatatgatttagagtcggttacagtggctcacacctgtaattccagcactttgggaggctgaggcaggcagatcacttgaggccaggagtttgagaccagcctggccaacatggcaaaaccccatctctactaaaaaatacaaaacttagccagtgtggtggcacatgcctatagtctgagctacttgggaggctgaggcaggagaattgcttgcacccaggaggcagaggttgcagtgagccaagatcgcaccactgcactccagcctgtgcaacaagagcaaaactccatctcaaaaaatatatatatatataaaatatatatatatacataaaatatatatatatgcacacatatatatgcatgtatatgatttagaaacagtagtgtacaacaagcattaaatagaaggagagtttgggtgtagaaagaatagattgtattgaacaaactcaataaggatgttataaatttgaacaatggaagaaaaaaggatagttgaaaggcagttttaaagtatatgaaagtggcttcattttctctacctattattgtattgtaagtttaacacatggcaatacaatgcaatgtaattgaccattttatgttcaagcctaatccctgctaaaagtattaagagcctttattggtcccatcatttaaccaaaatgctcaaggtctacaagataaaaccccgtgaactcacaaaaacagattctataaatgatttgtcatctttatgctaccgccaaatactgcctgttggtttagccacttttgattcttgttttcaagtacataattaaatagaaatttgatgcttaaataactaagaaccaatacttttccatatcatttcatttctgctatcatatatcttatttttggtaccagttcagcccagtaagacctgaaggaaggacttagaacctgggatactcaagacagaaagaactatgtatgctttagcacaaggattggcaaactatttcttagatgggccaaaacatgaatacttcgggctttgcaaccatgtagtctctgtcatagtgctcaactttcccataacatggaatttgctacatacaatatgtaaaagaataagctcagctgtgttctgataaaattttatgaacactgaaatttgaatattgtataacttttaagtatcatgaaatattgcctttctttctgtttttccactaactttaaaatattaaaactatttttagctcacaggccatataaaacagaaggtgggccagctctggagaattgattttcagactgcaggctgtgattcattaggtatacaatgtaatcaataaagcaagccctggccaatactttttaagggcaaaccatgccatagcataacatagatgagaatatcacagttaaaggaagtactattttgtaaaacatttgtttcagttacatatacaggatcatgatatgaaatgtattgctgtagactgtaataaaaaagattttaaatcattaatctttactagcaaggaaatttagtgtcaagaatgtgatgtgtcttagctcaagtttacacagctagtttgtagagactacattaaaaccagatattctgattttcagttcagagtttctttgactgaattaaaaattagattcagactaaaataattctgaaatacttataaaattgcctaattttgaatgatcaggataaaccctaacattaaaatatttagaggaatgtaaaaactaactggcttattactaacattcagattattagcaatagtcacctaatttgagtttaaaacaatacaatgaattagaaagtatacagacagagtttttcctggaccttgatctgtgctgtccagatatgttgttccttgctctctagtttcagactaggaggtcaggcccagggcatgtcaactttgaccatcagtcttcagtctgtccttctcaggtatcaaaacacaatttttcccattacacatgccccttaattaggtagcgttaccacaacataggtggacactggatcacaagagaaataagccaccaagaactaacttgctgaaaagcctgagaaaaataagctgagggaatggacatttcctaagacataaacctggagaagttatccatttctcctgtctgcccatcatgggtgtgtcaggttgattttttaaaggacaattttaacatataagactattttctaatttttaaattatttgaaatttattttagtagagattttatttgtgtgtatctagctaaattaatttatagggatatacatgttatattatccacacctgaaaggttgttctctctgtactcagtaggattgttctaattacacaaagtccaaccaaatatattcttctgattaaacatatattttagcttataaactatttacttaaaaagattatataggtaatttcaactgaaaaatattctcacattaagtgtgctatttacatatttgttttgttatagagaatatctgaggctctacatcctctcatgagtaaaagaagatgtttaaattaatttcagcagattttcttttataaattgaataatattatttataattactgatcctagaataatccctaggtcagtttttctctagaaattaatagctgttcattatttcaagttaaatatttcctactggtattttttaattccaccattttctaataatcacaataggaattacattaatagcatcatttagcttgcttaccaagtcaatatcctaaaaagattctgagataatacttggtctcatcataataaactgatcaatgtaactacctgtatactccattagaattcaggcttctccagcagatggaacataactgttttatatttgtgtcctggcctatggtaagtatgcacactacttatagaatcaaatctttggatgccttttatccttggaaatgactgggttctctttttgacagatttttttttttgccatttatttgatgcccttttttagatttcctagttcatccaatttcaaaatataactcactttgtaatagatctccgtcatattataactggattctgagtaataaaagtaccacttacttttagtttataataggtctaatattttacactagaagtgtttttttaaaattacgaagtgactcacatactgacttctttattgtatcattattggactgtattctggtatgtaatatagaacttgactcttaagatctcaccatgaattgtggatagttgtgatttggatataggattttctagttaggcaaaataatcttgttaattcaatgacatgtaattttttgtgtatatagtctttggcatactatcccaataaattatttcttgggttgaatcatgattataatagtttctgtgactttggggaatatcttcaatgttgtaaaattgaaggaaattctaagaacctatttcattcctatgaatgaatgcaactgtactgattactcatctctaatttttttcttaaatggaggattcgtaagaaaattcgacttggattacatttgagaatttattgctttgagcacaaataaggaactttgtgaagtttagtttgttttttcagggtatttcaacaatttggcaataattattgtataaagttaatgtgcttttggaagtaagtgaggttcgcctgactgacctctacttgaacctgccttagcctgaaaccatttttttggtgatttatgccttaattacaatgattatcaaatagtttccttttaccaattatgttttttctctttgacttcgtgaatatctttttatgaagagtgatacatagcatttccattttacatgatatattatttaagtatttcaaagaaaaaacaccagtgcttttttgaatacaaaaataaagatcttaaaggtgtatacaatacaaaagctacctgaaatttatttaaatttgtgaacttgtaattagtaaatatatttatttgagaatttaaataaatatcagaatttaggtagtttgaaactgtatacaaattgttcgtgtatacacactatgcttaaaaggatttatattttatagaatataaattatgttatttatttatttattttgagacggagtcttactctgtcacccaggctggagtgcagtggcccagtcttggcccactgcaagctccaccttccgggttcactccattctcctgcctcagtctcccgagtagctgagactacaggcgcctgctaccacgcccggctaattttttttttttgtatttttagtagagatggggtttcaccgtgttagccaggatgatatcctgaccttgtgatctgcccacctcggcctcccaaagtgctgggattacaggcatgagccactgcacccggccaattattttatttttaatatggaagcattactatagccacttttatttaaatgtaactacttgtgtaatgtaatcatatgactaacatggtatatgttctcttttgattattaatatttcttgaaatgatgtgtacatggttaaaacacatgtatcattcttaataattatttaggaccagtctttcttgagcagtgttaaaatttgaaccagacataggttagtaactttagaatttaattaaggcttttgaaatttcaaggagctcagagagaaataaagaaagttgatgcagaggagtgatacaggaataacaattgattctataattaaatttaacccaaaaataattgcaagatccaaatgatttatgatagcgaaaatgtctcttatttcccttatttcatccgtactcattgctgttgtgattatattagcaagacactcaggtcagtcaccttctgtagtagaaatctgagttactactgtgaataaaagtatctcattcaatttcaaaaataattgttttatattatttagagtcatagtactttattgtaatccttatttcagtaccatattctttagactcttacataaatctgtatttgtatgtcttatctctgtaactggtctgttagctccttgagaccgaagactgtatcatttctggatttcttaaagatccttatagatagtgcaaggcctatagcagtgatgtaattattgttccttaaataaatttttaaagcataaattaaaaaacagtaaagttggggcagtgtttcacagacagtaggtgttaataatattgctgataatgccattagagtattctcttcagctcatattaaaatcaggttactagtttaaatctgtataaaaaccatcactatagattcctttttgtattataatctgtcattttgtagaagatttatctgtgagtgttatgaacttcaattctggcattatgtaaaaaattctcagcagaagcaaaactataaaaaagaaaaaatattcacagtaagatttctaggctgtatcaacacaatgacaaaaaatttagaaagtttatttcaataaatcaatcaaaattattatttgggtattgtgtaactacaattaaacttaactttgtttctgagcaatctaaacattctgggattacaatttaaaagcacttagtcaaccattctcatgtggaaattgatttcagttcttccaaatatctgaaatttccgtagggaaatgtgtaatatcaaattactttgaaattgcaattaaaattaataatattaatttctttatcaatcttcgaaaatatctcatgtaacacagtaccactgatttctgacttttgataagccagatgcattttacaattcaaatattttggatcaaagaaaggtaataagtgcatatatttcatagcatctttaggaaaggctgggagagctccctaataaaacacattaacatgtctacagtaatacataaggattttcacaataaatagaataacaaattgtaaatagcatcacattattcaggggaaattttgctgataattgaatttgtgataatcttacatgaaagctttcagttttcagagctttttgggtttcagaattgtaaagtatcatggatgtacagctgaaataattgcccctgtgatttttaatatctatagatgtgtaagtgtgtgtatgtatgcatatgtttttctttttccttttctcttacagatatgtactcatgcacatgtgtacacagacacacacacacacacacacacacacaccacacagatgcatgtacacacacatcttgggatgagtaaatagtttccttggaagacagccaaactcatttgtttatgtattgtctatggctacctttgtaccacatgccagagttcagtggttgtgacagaaacttatagccaccaaagtcaaaaatatttactatcaggacctttacagaaaaagtttgctgccccctaatatatctggtatatccagaaacttacgttttgttcctattttaaagacagtaagactgccataagtttgtgataactcagtttttagtgaactaaagaaatcaatgaatgcatgaactctcactgtctttacagtattttgcagggttttttttgttaaaatttataatccaaacatgaatgtaagctgcattggcttaattatatttaaataaacttttttagtcaaaaaaatgaattttattatagttttaagttaatattagagttgattccatttgtaatacagttttaaaataaaatacttgagagaacacataggcaaaccttaaaatgtccaattaacatagtaactaatctacctatatacatcttaatattaattttagcaatgataaaaatttaagccattattgttatttcaaaggatgtttcatgtctatttttgtttgttttcttggttttgaattagaaagccacatgaattgcttgctttgctgttttttagggtttagatcttagtaagttcaggtgacttacatggtaacattgaaagtaaattttacagagagaagcatatcacagtgagggaataggaagacaatttcatgtttcagattaaaaaagtaaaagaatagtagaaaatatcagaaattactgttgtgcagatagaggtgtataagtattacaggagtctaaaagacactcattatggtaataccctgtgtcttagaatccttcacaataccatgggagaagtgtagagaacagaattttgaagaatacaccactgaaactaaggcaaatgaagcatattggacatgcaaaattcctttccacgtctatagttattcaacatttgttactgaaatgaaagtatttcagtgccattcagctctactaatttggggatttttaaaagttaagaataggctggacctggtggctcaagcctgtaatcccagcactttgggaggtccaggtggatggattgcttgagctcaggagttcacatcagcttgggaaagttggcaaaaccctgtctccacgaaaattacaaaaattatccactgtactccagcccaggtgacagagcaagattttgcttccaaaacaaacaaaaagattaaaaatcattagaagattaactaaaaactagttagtcctaggcatatttgatttttaaaattcagattgtcagtatagtcatgtctatttgatagaaaataaattggtatcttttattgtgaggagaaatattgtctataatgaaactgatcacttttccttctgcagatttgcttcttaatttgctttccttatctcagttaaaggtatcatcatcacactctgatggttcctttaccctgtcccaaatagttgttaaaatagttgtctaaaatagtttgtctcattacagaatgccttgagtctgtctctccttgcattgtcaccatcttgagctcaagctttcagtcgtgtaactaaactctttagttactagcttcttcctatactgctgacagaaagtggtctttccaaaatagagctaattctgtctgcgccctgcttaaaatcctgtagtggctccctggtgatgataggatagtgtgccatgtatggctctgcttcctgcctacctctctgtcttcatttccagtcacttcctttcatccttcacagcctacgacataacattccaactccactttgctgacgattgcatgcttctttatacctcagacatttctctgtcacctggaatgaccttcctttctttctactttttgcttagataggctcagcattatccaacttaaatgtcacattccccataacttcttctcctagacacagttgcttactacccttcctgtgcttctcacactgcattctctatgaaccccctaagattctctatcatgattatttgcttatattatctgccccacatcccacttagtacctgccatggtgtcaggcacattagacaatatgtttggtaaatgttttttgaatgaattgggatcttattctaaaaaatgatgttcttatttttgctcaaaatgtaattttttctctacagttgatagtgaatgatgatttatagatttattgattcaattaatatttactgataatatattcaaagcaatcatagatgtctgtcagagtctcctctcttggatccttacttaaagaaaactttgacatttaaaagattagttccatataagagcatgatttcttgtccctagaacatgtaatattcttcatctcccaccatgaggaacattctgctagagatggaatttttcaacggtattttaaagctttagggctcttttaacttgatattcaattcaacagatgtaaaaagttagacccgcagattgactcaaaagagtctgacagttctttattaaaataatatcattgtaccttttagtagtgtttgtattaaataaagatagctttgtcccaaaggccaagcttctaactttatactcattttggagatttcttatctggtttatcatttgtggcagttttttgttttgttttgttttgttttgttttatcttgttttttagtggggagggagtgtcattctgaaaatagaaattgacttcctacccctagtcagtgtgaacccaaaagaactgccagtttttttggataatggtttactcagctatatctgttttatttactgcctggatctggaccacctcaagtttgtccagctaattaatcttctcaagtacttgtatcttagccactcagtgagctgacttcatctttcaacaatatagttcataatatattcaaaagcacttaatggacggtttccttactgttagaatatctcccaaatatacaagcctccttcctcataggcccccacacatttattgtttacatcccaggtgttcattttatactgctaagctgtatggcttgcagtactgaatcagtaattctggttagaatatttattccagtgaacatatatattttctggtgaaaatattctattactttgcctgcactcctaactatatttttgttggggaggcacatatgtacagctcctttgggggcttcttcttaattaacaaggcacagattgtcatgatagaataggaatgctataaacagtccttagtatcatttctcccgttttataacttgctttaaattattccttttgtctttcaaaaccatataattttccttcaatcttaatctatctttggttttcaccctagccctccagtccacttttaaacactcttatagtctattcatccatcccccaagctataaaggtttttttcagattttctctttgttctctgcttcctgtgtactttttgcttaagctattgctttttgtccccttgtctgaccacaataagctactttcaccaggaaaactgtcaaaatcattcacctttgaattgaccattacaacccttctcataatcaaatattgccatcttattaatgccaaactattcatgtagctctgcagcaaacagaatgggctttgagttagatgacctgaatttgggacccagttccaccactgactgaatgacacacctttggctagccaccaagtctcttcaatttttatgtatcaaatgaggtagtaataactagtttaaacagttattaagagattcaaatgagtcagcatatatgtaagttatttgtaaattctaaagctctatataaattttatgtaatcttaatttgaattaaaatatgggcacttgggaaggtataaataataacttattactgtaaactccttagtactaacattatattttgctcataagtggagatatcaaatgagctaatttgattatgaattttttgccacatacaaaaaggatacactcaaactttttgagacgtacacttgtaaaatatttgtctcatgcatatacagcttaagagttacttatagcatcagtcagtggttgtattttcattatctctagtaaaacattgagtttacctcttttttttagtaatactcccaaccaaagtgattatgtaatttttgaagatagataggtctttcaaatttgcctctgcttgtgttctcaatgtcacgtttagttcttcttttgcttttgggagaatccatttattctttctgtccaaaactaattagacaaaacacatgagtaaaggtgtgaggttctatggacttgaaatcacaatagccttttacaaaatactgagagcactgtttgcaaattgcaattttgttattgtgtcaattttttgccattccttttgaacaaagcattaatgaagcatttgtttatatttttcttatgatggaatgatggtatttgtaaaaaactataaatggtcttgttgcatagggttttttataagttcattttaaaaattggtttctgagaaattaatgcaatttcatgtttttccaattttacttcaatttattatatatttaaaaactcatacacaaaatgtatgcgaataattctttatatcaaagccttattgtctaaatttacatgagtttaattatgatcctttggccttttacttgttttttctttgtcagaattcaaatctttgagtagtcaacaggtgataaatgtcccattaatctttctgactccctagaacctgagcatgagaattgctgatcagttacaccaattgtctcgtaaatgagcttctcacatctgcctcttatttcattagttaactgtctgcccaaatatctgataagatggaatactagtacctttttacagcttgttctgtcggtctgtacaataaggagatagggtcgttagcaaaatgggcacaaaagagtatttatccactacctacaataaatatgcatgctagtgtctagaaggcatttgagactgtttattgaaatcacctcaagaaacaaaaataactggtttcacttcgattttccatttagcaacaaataatgttaagaccatggcctgccttactgtatgatgcttttactaattacatttatcatcaaaagaagaaaaatgatagtatttctaaaaactatgaatgttcttgttacacagaagttatttttgaaagaggaaaaatctatttattaaattaattttaaaaacagtgaaaaactttagaaaatatttttaaattaccaaacatcataattaacgtactctcaacagtgtttttaatacttgattacctcattctctatgttggcacttcgaaaaactaccaattaagatctgctttcttatatacatcgttatacagcagtcatacttttaattggaaaaaatcttgataacttcatcaatacatataagaattaatgtttaaactgtttataggaaatatacgttcttaacctgtagaatgggaataataatactatgtcacagagtataatgataattaaatgagaccatgcacgtaaggcactgtgccagtgtgttaaatattgcccagcacatgctaagtgatcaatgagtagtagccattattacatagacattattgcaatcaggtttttttcttctgctatctatttggggagattggagtataacggtgaaatattttataagcattgcttgatgtgttaatcatacattttttattatttttaaaattatttaataactgataagctattgaaattacctatttgtaaattaattttgtcttttggaacaaaatttaggcagaacttcagtgattattgttctttgctccaaggaaacaaccatataataaatgtcattggcgtaatagcagctatacctagctcatcaattttaataaccttccccaccttgtttaaatgtaagaaatgcctcaaccaaataaacaaccaaagcatgaagtcagttttcgagtattttcacatcatcttgtgacaaacccacagccaatatcatactgaatgggcaaaaactggaagtgtatctaaatagttttaaattattgctaaaaatgtatgctaggtgaacattttcattcagtttaccttaggaattctatttaaaagaaagttttttttataaattaaaattatataatgaattaactcagaatgataatttctgccattgtaatttcattttgttttaacctttctttgttgtaggccttgtttgtatgaagtccagcacatctgtggttgagcttgttatgctgctttgttctcaggtacaaaatcccattcactcagttacattaatatatgagggttttttgtgactaataataaaaagtatgtgcatatatatgtgtatgtttatatatttttaaaatttccatctattatcccatagatggagaaaataatttatgttgagttttattagtatatagattatcttaccatgtaaatattgacttattctccctctcccttcttctactctttttagcagtattattctcctaccctttcgattcttccattgtttcctatcatatatatgtatataaaatacgatatataaaatatcttaatttataatttttaaatgtattattaattatcttgtatcttcttctcttatatttgagataatgaaaagtaagtttttaaattccatacccaaagtgtatgatacagcttattaatgaatggtctttgatataagaccttgctgctttctcttttttaaatgtaatttgtatatgtcagtgtaaattctaaaaatctacttgagctgtttgtctttaataatcagaatcaaagataaatgataattgttgggtattgtttcttcttaacaattacagggcaaccaaaaataaatgtaaacatattttctgattacttaaataggaacctattggtttttcttctcaccagctctgtcaagtctcctagcagtcctgattatcctgattatcatattagtgttaaatattttttaatatcagaaggaaaaaagagcttgtgtgtgtttgtaataagcagttattatctttattcgtagtttcctcagtagaaagaaacatatatctaagctattcctaattactggcctgaggtttgcctaaagccacagctaactcgcagacaaacaacaatatgctttcaagtgatcctctaaaacatcagcaaaactgaacaaaacaaatgaaaaacttaccaattgatttcagttttcaggtttattttcttcaagaatatattcctaggaaaatcattaggcccattttcctctttatagccaggaacaatattgataaggaagaggttaaagaaaacaacatccctgtgaggaggtcgtctgcagggcatttgaaaattttgtcacctactgttgaagtcctgagttcgagagactatctggaccttttcgattcatgatgatgcacagttctgtaaaatgcgtttatggaaaaatagcttagaattccttcttccatagccctgtgtttcactgcagttcagagaaataaagaggaatgtagcattaagatctagtgtctttgatggcctcatcatctaatcataggtttaacattactcatttgctggctccaggaattcctgccattaagggccctagagatgaaactttgcctcagatattgattgaaaggaagagtgagaaatttaagctctctatgcagtgcactttctttcagtgtttcagcaaagcaatgttgtaaacacacctctcgatttgatttttaagttgaatttttaaaataattcagtgtttttaaatattttaagtgtttaattgattaaatgcacctcatttaagtaacttaagaatatatgcttattctttaaaatagctcccaattgtttttgttattttctgtttaactgaaataatgctttcgactaaatatttttaatgaaacaaataatcctcctttattcttattcaggggggataagtttaccattttactgtgaaattaagcttctagaactatctttgtagatcattaattgctccatgaatgtttaaaatcatgtctttagttgtaaggacacacataccaaaaaatggacatgtcttcaacgtttcttaaaataatgtgccatttttctatactacttaaatttgagatgatttatatcctattttcatccattaacagggcaacatagcagtaacatacctctgaaaagagaaataaatacagttaatgatgctgtggagattgcttggcatagctctctccaaagcagtgttcttctacagcctttaatgcatctcttgtagaatgaagcacagtccctgtagaattagtacagttctgtaggccgtctttgtgccaaggcagtaggtaatcctgatgaatcttgaaagctgcagagttctgagttctttttgttttgctctacagacagccctttgtaagtcttgatagctccatgttactgtcatgaccagtattaatactaataaaaatagttgaaaatctgaatgagtaactttaagttactatcttgatatactatgtgtatatttttccacagtgagaaatccaactaagatattattcatattgtaatttaatgctggttagaataagttggaattctgcaaatggaatttttaatgtatttatttgcataaaatatgcttttctttttccaaatttagacaagccattgaaagataaaaattttttgagagaccgggcagataagtattaaaaagggaaaagaaaatgcaatattgtgttttttataggattttgtttttctttgctacaacacattagatggcttttatttttatgcttctcattttcattttggaaatttcctgttagcaactacatattattaaggatattagcttttctttcttatctgagctcctgaataaacttactattcctaatagtttgtgcccaaaatatggtctaaatttacgtgagatcatattacaagtgtctgaaggtacttgtcaaggataattcagttcatatgggcaaacttttaaactccaaaggctatatcatccagtctaccccccaatgtaatttttcatctttgtggaaaacatatttaagtcttaagaagaagctgttaatattatcattctgatatatttatcattccacaaatacccaaaacatttttgactgtattctggatttttttctgatatagatcttatgatacaagtatatttattcttcttcacttttattttgtattaaagttgttagtagcattttaaaaattggtttcatatcattttgaagtgaaatgaactaaagtaaaaaaattaatatcaaatcagtgcttaattagggagtacaaggttttctacagattcttcagtatatcacaggtctgatactatcttctatcatagctttttaaaaaagttttataattagatatgattgaagtgcttattctctatttgtgcttattggtttattacattatttttactgtattgtgctctttgatgaatagcagatttagttttcaagtaaacttctttaggtgctataatagttcctaattacttccagattttttaaggaagtctccataagatatactccaggaaaagtggactgatgttatcccatagcatttctgtaagtttttataagtaaagcttagcagatggcacttgcatttttctgtgccttatctgtcaatagaaaacattttataaattgagaaactgtacatttaaaaaattcttagtatttaaatgctttctgactggaggcaatgattaagcaaatgcatgcttagtaagtcatttctactcttactgaaaagctaaagatgtataagtaatataaagtaagaggcctgcaagtcttagttaggcatctgtgtatgaagtcactaacatgaattattttgtggtttgtttgaatttacttttttctaaatacctcatatacttaaataaaaagaattttagtgacttcattgatgtgatcaaagcattaacccaggacttctaaagacaacacttgtaaaagaaccacaactaaagaacaatcttttttttttttaatgatttggcctttgaacatttacgtttttcatttttcctccagtgtgatacagttgagtcaaatagtacaaaagaaaaaaatatacttttcttctgaggctgagttacaaagacataggtaagagaacatagaggcctattaaaaaatattcattgtaagtactcagtagtgaaaggatttttggtgtgtatagtaagaagatttcaaatataaggaaaccagggatggagtagatgttttttccccgttgtctttggaaatatcatgaaatcctaattatcatgatgaagttatgtcacatttaatttggtagttatttagtgactacattttttaaacattttaatggttactaaagacttacacattgttccatttctcatgtttagtgttatctatgaaacttgccagttttgctgctgaatttgaattcaattaagaacaataaaaaattatgacctgatacttaaaactgaatataaatgagcagttacctttgtatggttcagtaaatgggtcctatgtaccaacaataagattgtcatggaaaagtttattgaggtgaactaaaaatgagccctgacgatgcaaggtatcctattcagcataagcagcggagaattgggctgaagaaacagcctgagccctgtttcttcagaaacctgaggtctggagaggaatgagtctgttcaacagtgtctaatcatttggcttccctgggccacactggaagaagaatcatcttgggccacacataacatacactaacactaatgacagctgatgaactaaaaaaaaaaaattaaaaaaaatagcagaaattaagtggccaggcaatgtataatatttatatttaatatataaatataatatttataatataaataaatataatatttatttgtttatctagggtattatccatttccaggcaatgtgtaatccaataccttcctcaagagtatttttaatataaaatattgtagtgtgttaatagtatagaattaaggctagtaagaaatgtctaacttttaaacagtattggatagttcatgatcattgactatagattctgtttttagaagagccactttttcattttctaatatctaagaaatccctgcctttttctctagacggtgggtgaccccacctcttatctgtgatataatgtcatttccaagttaaaggggtcaaatttgggcatttaatttttttggagtgtctatgttatataatctttattgccataaaagtttgtaatatgtcctaaagtataaataaaagttaaacaggaaggtgaaaatacagtgaggcataaagattatagtcacctcagataacaatatttaaaattattagagaatatggagaaagttatgtactgaaaatgtagacattttaaaggaaaaagagtatcagtagaaaataattgggaaatctgtatttaatatatcttggggagaatcagtacagaacagattgcaacaggaagacgggctctctgttatatgttcaattacttacagcattcctggatgaaaatttaatcaaagatttaaagagcatataattcaaattacttttgattagttctatgagatattttattgttgaattctttttttaaaactcttagagaagttagcaggtataagaaattttgagtcagtctcttttatgttataaaatattttttctaagctacctgtgatacatacaatactcacacatcacataacacttatatataacaacttagcacatatccacctcaaattatagaggtaatagtttatgaataaacaaaaagttctgacctcatctgttagaaattataaactaagcctgatcgcggtggctcacgcctgtaatcccagcactttgggaggccaaggcaggtggatcatgagttcgggaccagcctggccaacatagtgaaacccgtctctactaaaaatacaaaaattagctgggcatggtggtgggcacctgtagtcccagctactcaggtgactgaggcaggagaatctcttgatcccgggaggtggaggttgcatttagctgagattgcaccactgcactccagcctaggcgacagagcgagactcagtctcaaaaaaaaaaaaaaagataaaaaagaacaacagtcttttttttcttatgtctaacttctcataattctaataaaattgagggaaaaaagaaatcaataaccctaggccatctgcaggatcatttttaagagtgtttaatgtctgtgacagaagagaaggaatgtagaatattctgaatccctgaatccctgacactaagcccacctccctgacctaaaatttctttccatactttgtctcaaaattcacatttccctttctcccagtattttggtttatttttctttaatctttattttcctgtgtctacattgtataagtttttcagacaaattacaacaactttgaaaaatagtgaaaactatatatatatatatttcacacttttacttctagtatacattctcttttttggtggtaaattttcttcatttttgtcacacatatttcaatatgctttatttttattagctatcatataataagtagttttctgtatcctcttttttgttacattgtacatttcctcatgatcattttttctgtggtttcgttgtttaaataattagagactcacaggaagttgcaaaaatagtacacagagtcccatgtacccttccctcagcttcctccaatagtaacatcttacatataactgtagtagagtataaaaaccaggaaattgatattaatgtagtactgccaactagatgatagacattattcagcattctctcttttttacatgtgttcatttgtatgtatatgtaactcaatacaattttattccaagtattaatgaaaccaacatggttgttcctgtacctcatatcttcccaattatttcaaactcttttatttcacgaagcctttctgtattattattgttataaggttctaatctctccatcattcccttagcatctgagtgcataaatctagatgataaatataggtatctgtttatatgttttaattggatgctcttatatgtgattaaggtatgattttctttatctaccacatttcaggttccattagaataagctgcatttctagtatttcctttctttttgaagaattctattctgccaatggagaaaataagtattgtatagtctcaatatattaacatttatgaagagcatttaaaatcatacattgtttatttacaacaatccagaagaaaagactacttaaggatgacacagaactttgcagtttcgtgaagtcactttatggatgttattcatttcaattatgctacaaatttacaccatactaaagatcactttatttttctattgccttctgttgtgcttaccactatgtcttccactcctagtataaatatccagcatatagtataggtagttattaatgacattttgagttattttataaataaaaaggaatatatattagctaaggtgatttgttatttatttttattgtgataaaatacataaaatgtaaaatgtgccatttttaccattttaagtatacagttcagtggcattaattaaattcacaatgttatgtaaccatcaacactacaatgagaaggttagggaggccagtccccctacacagtcaaaaatatgcatataactttttactcccccaaaacttaactactaatagctcagtactagtgaccagagccttaccaataacataagccatcagttaacacgttttctatgttatatgtattatgcattctaatcttacagtaaaataagctagagaaaagaaaatgttattaaaaatatatatagatacatagccagtgtgtgtgtgtgtatgtgtgtgtgtgtgtgtgtgtgtgtatatatatatatatatatatatatatatatatatatgtatatgcttctttttttaattttaatgtagtccaaaagtacaagaagctgtttcagaggtcaagaatatagtaggtcttcaaacaaatggcagctaattatgtgtcagagattcttgtacttagttaaaaatgatgatctctaaatttctctacagcactaatgttcttatactggcttccacaactattgctgcatgatcatttgtgaataaaatatgaaatatttaatataacttagtacctatttctaaatcttaaactacacatttgaatgtgagaaactttttaacaactcaaacctaataaacatgagtgttgtatatactcatagaatatgctctctttaaaaatatcttgtaaaacagtctagacttttttattacaaacacaaatacaaatacatacactcattttataataataagatgtgtccaatttgaaacataatttagtgatcacctaaagtcctggaagcctgcttatgtttatatgatacgccaacttttccttgagtaaccaactaaatatatttcagtatttcctaattttttttatggttgactattatatcggtaatcttctctttgaattgatcattcattattcatttcttacattcagtttttcctataatacttttagtaagatcttcataaaaataagaaatgaaaatgaaataaatggtactttaaatacttcacatatatattttcagtaattatgtatgttttatatgcattgaaaaaaattctcgtctctattttcaccctacagagtgtttttttcacttcactccttatacttactgacttcaacttacagcacagaatttctaaacatgccagttataatgaacattcactttgaaaattttaagaaacacacctatgtattttagtgacagataatgataaatagatattaaagatatcagaaatataaaatcaattctggaattcttgaagacttaagatatcaatttactctaccatttttccttgtaatttttttatatattcaaaacttttatgatggattgaatctctaaggacggtttatttaattgtatacaaagaagagggaatgaaaaatgtacattgagttgacatagatggggagaaactgatgggaagcattatattttggatctgagatttcttcgactagtccatctaactaccataaagcgattgtgaagagaacatagggattttatcgtcatccttctggaacttatttgtcttcaaagtgtttagtttcaaagggtccttaacatgagatccagttccctgaaaaagtccttcatcttgaggaaattttatgcatccatgttgaagagttaaaaaattgtgacaaaactatctaaagacttggcagctctctgcaggcattcaaacccaaagttaagtattgtccccatgaaaataaaaggttgttcatttattttttcagcagaaaagtgcatatatgtctatgtaggtgtgttttctcaaatggcaaaaaattctggaataatttgtaagataagactttaaaatatacctttttcctgtcattgccaagagcttgttgttgatgaaatgacagtaaattattcttatccctttgcatgtgttttcatgtatctgtgtgccttgttttaagcaaattctctaagtttatgtatttgtcagagagaattgttagagtgctaggacagggactaaagttgtcttccatgtccacctctatcccattttttaactttcaaggtagcttatatctcagcatccacaacaaacaaataccgtttctcctctatgctatgtacttttcttgtcacaaagttttgtttatctctcctttcaatattttatccaattattttttgaagctcttagaatcagttacatagtaatatgcacttaagaagtactttttgaaattagccgggcatagtggtgcacgcctgtagtcccagccactcaggagggtgaggcaggggaatcgcttgaacccgggatgtggaggttgcagtgagccgagatcgagccactgcactccagcctgggtgacaaagcgagactctgtctcaaaaaacaagaaaaacaagtattttttgaaattataaaaagaaatgtgcatcagtataaaagaatataatcattgcctacccaagtttgttacaaaaattcagaaccgtgtgtatctcatttacttcacacacactgtaaataaaatactacaaatataaataattccatttcagaggcaatgtttcatgattaataaaagtaacattaactgatgagaagatgatgtaggatttatcccatttcttattttcagagttttaaaactatttcgtttacatgctttaagatttgtttcattgctatcataaattcttagaccttactcctatggaaaagggcgatagaaatagaaatttttagacctgactcctatggaaaggggcaataagaagcataaattcttgtcataggtattgcacttttccataggagtcaggcctaaaaattcatcggtagcttaggataaccaatggagaagatgccctttgttacacttttcctataggatacatttttcttctcattccgtttttttctttatacttatgcatttttgtttgccacccaatactgtgtactgttgtctacctaggatgtaaagggattggacttctcaactaaatatggtaaaaaaaaaattatctttgccacttttacaactgtcattcacaaattattaaacatgctttaaaaaccacatgcaatcctaacattttctgaggaggaaaatatactttatcttgtgaagaatattttatagtcccttttctgtctctcatttagtaggtgaaaaaaataaacttctgttttcttcattgaccacaacaatgagagtccacaatatgtttttttttttttaattttactttaagttctgggatacatgtgcagaacatgcaggtttgttacataggtatacatgtgccatcgtggtttgctgcacctgtcaacccgtcatctaggttttaagctccgcatgcattaggtatttgtcctaatgctccccctcctctttccccaaccccccaacaggccccagtgtgtgatgttcccctacctgtgtccatgtgttctcattgttcaactcccacttatgagtgagaacatgcagtgtttcattttctgtttctgcgttagtttgctgaggataatagtttccagcttcattcatgttgctgcaaaggacgtgaactcgttcttttttatggctgcatagtattccgtggtgtatatgtgccacattttctttatccagtctatcattgatgggcatttgggttggttccacatctttgctattgtaaatagtgctgcaataaacatacatgtgcatgtgtttttatagtggaatgatttatcatcctttgggtatatacccagtaatgggattactgggtcaaatggtatttctggttctagatccttgaatcgccacactgtcttccacactggctgaactaatttacactcccaccaacagtgtaaaagcgttcctattgctctgcatcctcgccagcatctgttgcttccagactttttaatgatcgccattctaactggcatgagatggtatctcatgagagcccacaatatgttttatgctaaatcccagaaaatagctgatacaaacttatctttaaaatttctagttttagtgctgtctgtatggctaaagtcattaattctccaactcttctacttgaagcagcgcctcatgggctgcagtagggaggagttggaagggtggcccaaactgtaacgcatgccaaccaccagaatcacaaatgttctatgctcttaggctttcaaattctcattttactttattgttcttacattccttaatattttgaattagattactttagataattttttaattttttgttttcctctcaggctccagggggctggacatgtattatatatcctgggcatagttactgcctgtgtcttatgtatctcataccccaaattgaataaacaaaaactttaaactcccttccttcagaaaagacaattggtaacatttttgtgaccttatacattgttaatagcagttcataattgttcatgtagttaacagacattgacttggtaaattgaaattatgcaaatagttgcaaatagctgaagaattttgaaaaccttcaaaaactgaattatactctcttaatattaggtggaaccactttggctattgcttaggtcaaggcctgcataaactgttcttgtgccccagccatatcatattaatggagcatgtgtgacagaaaacaaaacattcatatctggcaaacaaactaataatagaacctagggaaaaaaatgcaccaggaaatataaaatttaaacatttttatacataaggattttttctgtgtttgccattcaatgttggctaaacttctagaattaaagtcttgtttccttaatgttgtagtatagtcattatgacaattgcaccatctatttcttctggccctagtgtcatcacagattaataaaacctgtctcttcctttaaaaatacagtacttaaaatctaattatataatgtgcacataaaacacataaagagtaaactgaactcatagagtcacatgaagaagactgttcagccagctggtgttaaactcccatattgaaaaattggtatttcaatttaaagttgctttaaattcctatatcaaataaaagtatttgatgtctacctatgtcaggacaggtgagcaggacagatagcaggatagacagaagacttaaatttcctgcagggcacagaggagaacaaaaaaatcttctttacattaaaaaaatcctttctcattttcataattagtaatactttttcatgtcttcatggaaaatgagaacccagttagattcgttttctataggattaaagaaacactatgttcaattagtattgttcatccgtagtagtattattttaagaggtctcattaccagtcacctggtttcatatctttggcaataacaagaggtggattgtatgttaatcactattgacccagtagatcactagttaataatatttattattatgttactcagactgtagcaggtattgatttaaaattatattagaatttaaaaccacatatatcttaaattcaaaaagaccaagacaaataagaccaaggagtttacagttttctgggaaagaagtaaagtttacagtcatgttactaaagtctgggtgccttcatgaataataaatggactattttatacataaacaagtacaggaaaacttcacactttttactctttttctgaagaattaactgttcttatcccttttcaggacactccattcttttatgcattcatcaggatttctgtcacctttcatctcttgtaatctttctgtctctccttcaccctttcattatggtccataattatattcaagtctcttcatcataaaaacttcacaaacactttcaaacctatctttctctgagcatcctgtccattgtttcttggctttaatcacaaagctttttgtgattgtttactctagttaccactttctctttctcacttaccagcccagtacaatgactttcctcccagcatttagggcctgtcttttgtcctcatcatacctgactttcctgaaatacgaaaatgacaatgtaatggcatgcaaacaaatgaaatagtgatagttttctaatgattgtattttaaaaatatggaaaatcttgcaaaattaaatgagaatgtgacacagtcccaccatcaaaatgagaaagtgacacagtcctactgtcagaaaatgtttaatattctcttcgacaagaagacttctgccaccctctcttcctctctaatagtgactcttcttttggtagaaaactaaaaaaagagcaactcaggccttctgagaaaggagttgaacacaaatacaggtcaacagtattatattgtcattgaacaaattcaggaattacattgccttgacaaaagcaattctctgtgtgtgtgtgtgtgtgtgtgtgtgtatatctgtgtgtgtgtgacggagtcttgggttgtcacccagactggagtgcattggcgcggtattggctcactgcaacctctgcctcctgattcaagcaattctcttgcctcagcctcccgagtagctgggattataggtgctcaccaccacacccggctaatttttgtatgacaaaagcagttcttgaagggaaaacatataattgcagtgatacatttttattcagaatgttttcataagtcttctgtgttcagaatctctctctgtaggctgataaagttactgtttcctttttgacagtctgttaccctgctttcagtacaagtctctcctgattcatcacagaaactctttatggttctgtaaaactatcactgttctaaaaaaattgtttttaaaaattttttatatttactgtgtgtattttaaaggcacataaccaacaaataacagacccctactccaccactgagatccactggtcgaaatcaactatttcaactcttttatctgtttactttattagtaaactatatttttgaaataacactgttatactaatgttcttggtttttcaattttaaatattttttaaatttattatatatagcatgtcactcttacaatgcggccactaccacctactaaaaaatatgggggaaagtttctgcttttctcagcatttccccactatagccatatcacagttttaagtgtgtcagtgtttcttgtaagtatcatctgtagctaaactatccaccatttccttcctaagataactattttcttttagagtgaattgcctcttcgctctttatttgttggctaagttttctggatgcctgttactaaatttcccccaaactttccagtagaactaaaaacctgctctaactctagtgcatgttaagtattctgtcagcctctgcttaatcctgttttggtacttccattaacaattatttagataattttcattgcctctgtcttgtttcagtctaccatttcttagatatgggtctatctctttttaaagttcttttcttatagtatgtttagggtttgtcacaagttctttccgtcttattgagcgcttttggtgtgtttgcattcccctcctccagtgagattgggcttcatcataggactttctctggccagtgaatatgggcaaagggacatgtgttacttctggctagaagctacaagagccggggcatgcttagaccccttctctttccctccatcttggctgccaacagtgttccagacaattgcaacatagtatgactcccaggatgatgccaatgatgatgtagagcagaacacagacagtggacacagaatttgagcaagaagtaaactttcatgttttaagcccctgagattcggggactagcacaacataaacttgtttctcctgtttgatatattttctcattttggcagagcacaccatcggtgggttcttgaacaagagtcagtgataaatttttatgcatgtgtgaaaatgtgattattctatcttcatatgttactgatagtttggctgcatagtttgttctgagtattctattcttcataattttgaaactggctgatgttaaactctcatattgaaaaattggtatttcaacttaaagttactttaaattcgtatatcaaatgaaagtatctgatgtctacatacatcaggacaggtgagcaggacaggcagaaagcaggatagacagaagatttactttcttccatcttctagttttgctgttgagaagtctaatctcattcagattcctgattctttatataaacttttattttttcctgcaagcctcttccttaaccctggtgttctaaaatttaatgatgatatacttgctaggttatattatgtattatattgttcatcatataattaaatcctagaaaatatttgaaattcctttgataatttcttgatacaatgtttctcattcactctttctaaaattcctatttactagatagtgacctttaaaaggaagatcctctaatttctttgtctcctttgttttctatctctgtctttttggttgtacctcattatctctttgttctattttctgggagatattttcaactcttttttaatgtatacaatatcttcatatgtcccagttttattactacatttttttggtgttgcttcattgtctctcattatttgggtttcattcccttccctccaacccccacctccattatccctttctaatattggtctgtgtctttaatataaggttgcaaacaggatcataggtagtgactttgaaagtaatatttgtcattaaagggtcctttctctttctgttttcctgaggcaatgtatatacgtggagtgttttctttcaaataatgctataatattctgcttctgttcttaaattttgatagatctttttctgtccctttctattgcctctttttgcaatcttaaaaatgtgaatcctttccagcctaggaataccttctcagcctagatatttgatcctcgttttgtttatacttcttaggagactttgcccaatgttatgccttactcaatatttctatgtaaataattctgaatttcacattcttttttgatataccattgccactgtaaatccaacaaattcagacaacagtgtttgtgattttccccaaatgtattcttcagtattttcataataatattaccattatcctggtcatgtacattgaaaacttaataatttttttatctcaacttctctacatcagctcttaaattcagattctcatctagtctcggcatctcttctttgtaacatctcttattttttattccctatttgaaatactcatttagactcctaatatttctcttgtggaaaggcgtgtaacaacaatatcctacaatttcctctggctcaaaactgacaaattactcttctaaaacactgatttattgaatgaagtcttgtgatcatatactttcattggctttctcaaactttaaactgtaatgtccttagcttagctcagacttacttctactgttcctccatcaaaggttgtaaattagtacatctcattggctgtatgcagattccatataattttagattgattcaaagataattttctcttgatttttttagacaaggcatactttgggatgcacatgtaatacctagatatgtactctgtgaaatatcttaccgaaaaatcttattcatgttagaagtttatggtgactaaagagtcttagtgtacaaacactatcacagaaaatcaggtgtaagaagttgtaagaatctagtcttcatagtggcatgggtcttcgtatgtaaaaatcaattttctctttaagttaatatcccaatgaatatgaagtatttctgagaaatgtatgtattttgtaggatcctgatttccaataaatacagaatatagaatgagaataacaaagaggctttaaattttgtaaacatttgggaaaagaaattttctgtaattgttttatacagaaattgtttgaaagtttcagtaagttctgtacaatggaatagcagtcttgtcatttggataaattttagttaaagattatgatagctagaacccagtggctttgtactatccccaagttaccatatctcttttcactagttgttgattttctctccttgggagattcaggatttgttattctataattcagcacacatttacttagagcagagaatatttatatacacacaagtacctactttgggggaccatatttattttcagaatgagtgtaaagcctttaaagggaaagggatcaggagtagaatgaagggttgatacagagactgtgttttttgtgaagctgaacccatggccagggcagctgatcacctctgtacaaccaacaccttattagaaaaatcatagggggaaaaatctatagaggagggccatgactggtcaataaagatttttctattaaaatgcattagggaactttgaggagtatttagttatagaaccattggaagggatataattttcaatccaaaacactgctatttactatatatatatatatatatatatatatatatatatgtatatatatatgtgtatatatatgtgtatatatatatgtgtatatatgtatatatatgtatatatgtatatatatgtatatatgtatatatgtatatatatgtatatatgtatatatgtatatatgtatatatgtatatatatatgcacacacacacacagatatatatatgtatttaaaaccccatatatatatttaaccccaaatatatatatttaaatatatatttaaaaccccaaaatatgtatatatttaaaaccccaaaaatagaaatcactagcataaaccaaaaacagtatataaattatattctaaatgtgctttaggaacagcataaaataagcatatgcttttctaatccaaaatacttcattataatcacttatgttcataatgatgagccttaccttgagaactgccaaattcacaaatataatctaaattagcagagattacatagttatctattacatatttagccataggtttactacttttttttacaattttcaaaatagttaatttgtaacttttttctaattagcattaaataattagcattaagtaatttggaatgtacatataactagaacattgcacttccaagtcaatttaaatatgttaatgtttctaagagtttatatttctagtattcattttattatcttaatgtaaaatttctatatgaggagctaaagttttctatcccaaatatttctagtccttgtgtagtcacattaggtctcttttggtcatttgctgtcttttggaaagaagctttgtgctcagagccccttatacctgcagtctcactttccatctcagtttgcatccagcctgaaattttctggtgaatcaaaagcaccttataaactaagtgataaaactaaaatttgattttttacaaaataatattcattacaaaatcttgtaaagacatttggaaataatataatgtggaagttattaacaatatcaacatgatccttaaaccagaagttactttcattaagtgttcacttttctcacgtttgttttggtttctccttttaggaatggcaaaactctattcagaagaatgcaggacttgcatttattgagctcatcaatgaaggaaggtaattaattttacaattttagacaactagtcagtgtacattttattccactgggcaattgctctttcctaccatctgttccaaaaatgtagaagaaaatgtcttttagttaaataatttatcacacaggtacttaattaatctttaacaaagtttaaaatgctaaacatttatttttgaagaaaaagccgtgcatgaaataaagggacaaaccttataaggtttggtgagatctgaagtacattttactgagtagtaaagttgttttacacagatcaagtgaacccaatctgcaatcccatctgccactccatctgttttcagagcagtgctcagtgtttactccttcagcttctcctcagtccatgtgaaacagttttatctgaacatgtcatgcattcaatgtccaactgaaaatgtgagggatattaaatatagcaaatatatctgtctcggttagaaatttgtatattctattattttttttttctttaacaaaatttttatttaataaatggttaaaatcgcagtgccaaaaatacattgacatttagcaatttcactgaaaggaagaaactacagaatgcacggtttcagaaagctattttaagttatttacaaataaagtatctaaaactcaaaaacaggctctgtatgctatatctagtttatcccttcctgaacaaaatttctgttatttgggcaaattcttaaaccatggtttaaaccgtaatggttacaaaccacaaacacatccatccaaagactgaaaccgtttttatccggtcagtggcaaaactgttgaaagggcaatagttgaagctgttgggttttatatagtgtgaactctgataaatattcctaccaggactaaaacacagcacgctttgcgggcatggctgactcacaaaggttgtatattctattattaaaacaataagtaaaattacatttgaacccattatttaccattttgtggtaaatagttgttaattattatttttgcagtgctttattggcagtggacacattaaaacagacgtagctgtcaccatgtgacatatatagcttctatcagcccaagacctgcaaactttacaacttgaatttcttgtatgatatagtgcattctttggaatatgatgattatttggcatgacctattcatttcatatttgaaaccagctttcattagattaatgaggaaataatgcttactgtatataaaatttatcttttcaagtaggggagtcatgaaagaatagtccttgaaaattagtttctatatggtatagatacccaatttttaaaaattaaatatcacttagtattcattttttatcactgtattatattttgagaaatatcttctgtttttataacaatttatcttattttatatttctcattttgatattttgtgacctaatcatgttagccagtagtacagatctaaaatttaaaataggctttgcattcactgcaacaccaaagttgcaggaaaatatcagttttcttttataacgcaaatagtgttttacataacagcactcaccatgtcttacagagtttcactgtgataagagttactaacaattattatccgttttcaggtgatgaataaacagaaaaaactatttgctaaggctaatcattgtcatttaagttttagaaataactctcaatgacatatccacaattattttgtttcaactgcgaagtaaaaatatatatatatataaaattattattatcagtaactctcctaagagttatcagaattgaacctctaaacacttaaattaagattatagtaataggcttagaaaaggaagggggtggaaaatttgctaatatcagagattttaagcttctgataatgcttttgtcagtcagtggtagaatttgggatttgctttatattaggaaaggttagaaataaagaaagtagtcacaattttaaaaaaaatttcaatctaggttgggtgcagtggctcacgcctgtaatcccagcactttgggaggccaagttgggtggatcacctgaggtcaggagtttgagaccggtctggctaacatggtgaaaccccatctctactaaaaatacaaaaattagccagttgtggtggcaggtgcccgtaatcccagccactcaggaggctgaggcaggagaatcacttgagcccgggaggtggaggttgcagtgagccaagatcgtgccattgcacttcagcctgggcgatgagagcgagacttcgtccccccaccaaaaaaaaaaattcaacctataataatctctgaaattctgtccattatgttctctgtgctctcctaagtttctgtttctactcttcataggactcgttcttccaaataaatatgattttggaataaggattcaaacatgaatagctgtaaatatataagaacaaatcatgtatgcatgagtgcagcaaatgtctgttcaacacccactacatgtcaaatactgctataagagttaggaatagagttaggaataagatataaatgattccagtttcttggggaaaggcaaacattagatgaacacatacagtaatacaaggatactgtgataaaagaggtataggtaatgatgcaatcgtaccacagaataatttacctagtctggagggatgcattccactgagtggtgggattatcaaggttttcaaaagagtacttacccaaaggaatgccatttgagagatcattaggagacagccaagtgagaaaaaaaagtagaaatacaattattggcagagggaattgtatagtgcagaggactagcggcaagagaatagtgagacatgttactggagagctatttccagtcagccagcagctatttaaatgcatgttgtatgccagccacatggaggcacaggtcattggcaaaggtcatgccatgaaactgtgcaaagaatactggagaataactgaaaatgtttaggtgtggcctgcaatgtggagggtttcacgggctcaagacttgaagcaataccaatctgaggttcagtaatcttgttgaagaatatggtgtcatggactaatagtagctatgaggatggaagaagtgaacaaatttgaagtatcttttggaaattaagtcactatgattgctaatatattggatggaagaggggaaagaaggaatcaaggatattttgatgtcagctttagtaactaatagtttacagtataagtataattcacttggctaggagagtacagaaagcgaggtttgagttgagagtttttcacttttgggttacactgaacttgtggtaccagtgaaatatccaggtggagatgttcaataggcatgggcatttgagtattgagctctccaaagagagagctggcatggagatttagacttatgagtctccaggttattcgtggtaaactgtagaaaggattcagatgtgatgctcagagagagtgaatagagtgagtggagaaccagaggccctgcttttactcctgtttctgctgggaatcctcttctcccacatcttgacacgactggttgtttctcgactttgaggaatcagcttaaatgccaccctctcacagaggctcccctgactatcttatatagttgttacactcccatgacataatcctcttgtaacacataataacatcatctcaaatgatctgctctgtttgcttgtttacatctatttctcctgctaaaatgtgttttccttaagatcttgtgtcttattcatcgtcttatttgctgctatatctctatattctggaatagtgcctagcatgtagttagcatgctaatgaaatatctatttatttgccctgttaaatgaatatttattgaaagcataaagaaaagaatggtgagtggaatgtttaaggaagaatgtatggtcaaaaagaggatttttaagttagtactaaagggaccactgggttcagccacaaggaggtcatgatgatctcatccaaacttaatgctggtgaacacctgtgtgctaaagaagctgggtgtagatccaaatcctaccctattagagtttacagtctagtgtgggcaacagccttagattaagtaattgcaagtttaataaatatgtgaaggacaactagaggatgctatgggagcaggcaactgagagaggtattttttgaaaaagtgatgatttacctagagtagagggacagaagccaggttgctttgagttgaagagctagcccaaaatgaaatacagacagcaagtacttcgctaaagaaatttggccaagaaagggaaagatagagtggttgctgtaggtgaataaggtttaaatttggagagaggggttactttttagaatgaagaacctatttttcaattttgatggaaaaacgcaatatggtgggagggaaagaaggcaatattgacagcataaactctctgagaggggtgcattgagatagaaggattggcctttagtggaagagcactgagaaagggtgaagacaattaaattggtggcagaattcagaagagatttcatatgatgccttctgtctatgaagtggcaggtaaggtcatttgctgagaataaaaggaattgggagagggtatatactatctttagaaaagtaaagaatactgaaaatagcgattgtaaaagaatggagaagagaaaaaactaaagaaacctgagaggcttgccaggcaatttgggggagccaattgaggttgctgtctttgatagtgtaatgttttcttcagcagttcgcagttcagagaagataggcatttgctttaagacattgacttctcttactttagtgaaaataatcttttcactgaggaccaaccccttcctacccctaatctggattaggtacctttctctgttctcccagtacctcaatttttccctgatttatatttacctatctatagtgtttatttgtagtggattttttatggctgttccacaatgcatagtataatacatagtatccatatgttaattctactgagttcaaatatcagttctcccattgataagctgttagacaacaggcaaatcataatcttcctctgacattgtttctcatctgtagaatactgtagcacctttcttgctcagtttccctgaaagttcaaaataatatatatgatatttattacagctgctataagtccttaaaatggaagtttttacttttgttattacatataatatgtattcagaattttgcttattcccacctttagtttggatcatttctttcaatttagacttttctctttcacaagcatgaactgggacttctggttcaaaaagtcatctttaggtagctgggatgcagttccagtaaaaagcccaaaattactattactctgtttatcttcctactgtatgttgatgcccattatgtgcgaagcacaaattaaatattttatacatgcttttatcccatttgcatgcacatataacatttttacaactttttcatatggcttaatatgaaatatttaaaaattcactttatttgggttgttagaatatcagtctttaatttgtccttatgggaatgaagataaaaatctttaagtagaaattattataaatgtttatcctacttaacagctacacttttgaatacaattcatcaatcatagctggagaaagcaattgtgcagttgtctacaattaacaggacaaaaacagttgataaatgtgcatctgaattaaagtactccctgggaccggctgaaattatacactggatcatttaaaggaatctaacaaaggatctttataattaaaacaaagcaaggttaatgggatgtaaaattgcctgtaatatcttggcaataatgattggaatttgaattattaaaatatgcattgaagaataaggcaaataggaagtacttatttaaaatacagaatttgagtgatctttttaaataaattaatcatttgcctgaaataaacctttgtcactcttttaaaagaatatagaatttaatttttgaatattcatcagaaaagaacagataatatttatgtttagcactgaatttaagctagagctctcaagattctgattttttgttttgtcctttagaataggggaaaatatacaccatgcatttcttaggtttttaagaggagaagcatattgcatccaagtataattttttagtgattgtatggcaccaatttgaatgtattctttaatttaacaaatgctagttaatattttaaccaacaagcattggtttgcttgagtttatttctcttatgtctttgatttggcaaaaactgtatttaaaaataaaacaaaccaaaaaaaacttccaaatctgtaaaataagaaactatttcctaaagtagatattctggtttaatttggagccaataatctctggaagctactggaaaacagaagtttcttttccatgtgttttcttataaaatctgacctatgccaggttttctttaacattcttttttaattattattattttctaatattatactttaagttctagatacatgggcagaacatgcaggtttgttacataggtatacacgtgtcatggtggtttactgcacccatctacccgtcatccacattaggtatttctcctaatgctatccctcccctagtcctccaccccccaacaggccccagtgtgtgatgttcccctccctgagtccatgtgttctcattgtcacctcccacttatgagtgagaacatgcagtgtttggttttctgttcctgtgttagtttgctgagaatgatggttcccagcttcatccatgtccctgcaaaggacatgaactcatctttactttatggctgcatagtattccatggtgtatatatgccacattttctttatacagtctatcattgatgggcatttaggttagttccaagtctttgctattgtcaacagtgctgcagtaaacatatgtgtgcatgtgtgtttatagtagaatgatttataatcctttgggtatatacccagtaatgggattgctgggtcaaatggtatttctggttctagatcctagaggaattgccacactgtcttccacagtggtcaaactaatttacactcccaccaacagtgtaacagcgttcctatttctccatatcctctccaggatctgttgtttcctgacttttaaatgattgccattctaaatggtgtgagatggtatctcattgtgattttgatttgcatttctctaatgacgagggatgatgagttttttttcatatacttgttgaccacataaatgacatcctttgagaagtatctgttcatatccttcgccctctttttgatgggtttttttgttttatttcttgtaaatttgtttaagttccttgtagattctggatattagctctttgtcagatggatagattgcaaaaattttctcccatgctgtaggttgcctgttccctgtgatgatagtttcttttgctgtgcagaagctcattagtttccttagatcccatttgtcaattttggcttttgttgccattgcttttggtgttttagtcgtgaagtctttgcccatgcctatgtcctgaaaggcattgcctaggttttcttctagggtttttatggttttacgtttaagtctttaatccatcttgagttaatttttgtataaggtgtaaggaaggggtccagttatagttttctgcctctggctagccagttttcccagcaccatttattaaatggggaatcctttccccattgcttgatttttgacaggtttgtcaaagatcagatagttgtagatgtgtggcattatttctgaggcctctgttctattccgttggtccatatatctgttttggtaccagtaccatgctgttttggttactgtagccttgtagtatagtttgaagtcaggtagcatgatgcctccagcattgttctttttgcttaggattgtcttggctatacgggctcttttttggttccatattaaattgaaagtagttttttctaattatgtgaagaaagttagtggtagcttgatggggatagcactgaatctataaattactttgggcaatatggccattttcacaatattgattcttcctatccatgagcatggagtgtctttccatttgtttctgttctctcttatttccttgagcagtggtttatagttctccttgaagaggtccttcacatcccttgtgagttgtattcctaggtattatcttagtagcagtggtgaatgggagttcactcatgatttggctctctgtttgtctattactggtgtataggaatgcttgagatttttgcacattgattttgtatcctgagactttgctgaagttgcttatcagcttaaggagatttggggctgagacgatggagttttctaaatatataatcatgtcatctgcaaatagaaacgatttgactttctctcttcctatttgaatacgctttatttctttctcttgcctgattgccctggccagaacttctgatactatgttgaagaggagtggtgagagagggcatccttgtcttgtgctggttttcaaaggaaatgcttccagtttttgcccattcggtatgatattggctgtgggtttgtcataaatagctcttattattttgagatacattccatcaatacctagtttgttgagagttttttgcttgaaggggtgttgaattttatcaaaggtctttttgacatctattgagataatcatgtggtttttgtcattgtttctgtttatgtaatggattacatttattgatttgcatgtgttgaaccggcgttgcatcccagagatgaagccaacttgatcgtggtggataagctttttgatgtgctgttggattccgtttgccagtatgttattgaggatttttgcattggtgttcatcagggatattggcctgaaattttcttattttgttgtgtctctgccaggttttggtatcaggatgatgttggcctcataaaatgagttagggaggagtccctctttttctactgtttggaatagtttcagaaggaatggtaccagctcctctttgtacctctggtagaattcggctatgaatccgtctggtcctgggctttttttgttgttgttggtaggctattacggcttcaatttcagaacttgttattggtctattcagggattcgacttcttcctggtttagtcttgggagggtgtatgtgtccaggaatttatccatttcttctagattttctagtttatttgcatagaggtgtttatagtattctctgatggtagttcgtatttctgtgggatcagtgtgatatcctctttatcattttttactgtgtctatttgattcttctctgttttcttttttattattctggctagaggtctgtctattttgttaatcttttcaaaaaccagctcctggattcattgatttttttgaagggttttttgtgtctctatctcctacagttctgctctgatcttatttatttcttgtcttctgctagcttttgaatttgcttttgcttctttagttctttcaattgtgatgttagggcattgattttagatctttcccgctttccattgtgggcatttagtgctataaatttccctctaaacactgctttagctgtgtcccagagattctggtacattgtgtctttgttctcattggtttcaaagaattatttatttcagccttcatttcgttatttacctggtagtcattcaggagcaggtttttcagtttccatgtagttgtgtggttttaagtgagtttcttaatcctgagttctaatttgattgcactgtggtctgagagactgttatgatatccattcttttgcattggctgaggagtattttacttccaattatgcagccaattttagaataagtgcagtgtggtgctgagaaaaatatatattctattcatttgggttggagagttctgtagatgtctattaggtccacttggtccagagctgaatttaagtcctgaacatccttgttaattttctctcgttgatatgtctaatattgacagtggggtgttaaagtctcccactattattgcgtaggagtctaagtctctttgtaagtctctaagaacttgctttatgaatctgggtgctcctgtattgggtgcatatatgtttaggatagttagcttttcttgttgcattgatccctttaccattacataattcccttctttgtctgttttgatctttgttggcttgaagtctgttttatcagggactacgattgcaacctctgcttttttttttgctttccatttgcttggtaaataatcccccatccctttattttgagtctatatgtgactttgcacgtatgatgggtctcctgagtacagcacactgatgggtcgtgactctttatcaactttgccagtctgtgtcttttaattggggcatttagcccatttaacatttaaggttaatattgttatgtgtgaatttgatcctgtcattatgacgctagctggttaatttgcccattagttgatgctgtttcttcatagtgtcgatggactttacaatttggtatattttttgcagtggctggtaccagtttttcttttccatatttactgtttccttcgggagctcttgcaaggcagacctggtggtgacaaaatctctcagcatttgcttttctgtaaaggattttatttctcctttgcttatgaagctgagttcgactggatatgaaattctgagttgaaaattctttactttaagaatgttgaatatttgcctccactctcttctggcttgtagggtttctgctgagagatccgctgttagtctgatggggttccccttggggtaacctgacctttctccctggctgcccttaacattttttccttcatttcaaccttggtgaatctgaagtttatgtgtcttggggttgctcttctcgaggagtatctttgtgatgttctctgtatttcctgaatttgaatattggcctgtcttgctaggttggggaagttctcctggataatatcctgaagagtgttttctaacttggttccgttttccccatcactttcaggtacaccagtcaaacgtaggtttggtcttttcacatggtcccacatttcttggaggctttgttcactgcttttaattctttttctctaatcttgtcttcacactttatttcattaagttgatcttcaatctctcatatccttctgcttgatgtattcggctattgatacttgtgtatgcttcatgaagttctcgtgttgtgtttttcagctgtgtcaggtcatttgtgttcttccctaaaccggttattctagttagcaattcctccaacgtttttttcgagattcttagcttccttgcactgggttagaaaatgctgctttagcttggaggagtttgttattgcccaccttctgaagcctgcttctgtcaatttgtcaaactcattctccatccagtttcgttcccctgctggcgaggagttgtgatcctttggagaagaggcattctggtttttggaattttcagcctttttcagctggtttttcctcatcttcgtggatttatctacctttggtctttaatgttgttgaccttcagttgaggtttttgagtgggcgtcctttttgttgatgtggatgctattcctttctgtttgttagttttccttctaagagtcagacttctctgctgtgggtctgctggagtttgctggaggtccactccagtccctgtttgcctgggtatcaccagcagaggctgcagaacagcaaagattactgcctgttccttcctctggaagctttttcccagagtggcacctgccatatgccagctggagctctcctgtatgaggtgtctcttgacccctgctgggaggtgtttccttcagtcaggaagcactgtggtcagggacccacatgaggaggcactctgtcccttagcagagctggagcactgtgcttggagatctgctgctcttttcagagccagtgggcaggaacatttaagtctgctgaagctgcacccacagccgccccttcccccaggtgctctgtcccaggaagatgggagttttatctataagctcctgactggggctgctgcctttctttcagagatactctgcccagagatgaagaatctagagaggcagtctggctacagtggctttgctgagctgcggagggctccgcccagttgaaacttcccggtggctttgtttacactatgcagggaaaaccacctactcaagcctcagtaatggtggacacccctccctccaccaagctagagggtcccaggttgacttcagactgctgtgctggcagcgagaatttcaagccagtggatcttagcttgctgagctctgttggggtgggatctgatgagctagaccacctggcttcctggcttcagccccctttgcaggggagtgaacggttctgtctcgctggcattccaggcaccactgggatgtgaaaaaaaaactcctgcagctagctcagtgtctgcccaaacggctgtccagttttgtgcttgaaacccagggccctggtgatgtaggcacccaagaaaatctcctggtctgtgggttgcaaacactgtgggaaaagtgtagtatctgggccggagtccaccgttccccatggcacagtccctcacggcttcccttggctagggtagggagttccctgaccccttgtgcttcccaggtgaggcgatgccccaccctgcttcagctcacccaccgtggactgcacccacagtctaaccagtccaatcacccactgcctagtcatcccaatgagatgagctgggtacctcagttggaaatgcagaaatcaaccgccttctgggtttatctcgctaggagctgcagactggagctgttcttattcggcaagatggccagccaacgccccatgctccttttttgccactcttttattcactttatacatctaattagttaataaacatactgagtttcatacgtgaaacatgacttttacaaaattacctgcatacatcttaaatagtatttcttatttatacatataaccttagacattgatgataaataaaatgttatttatctaaaactaaagtcccatttaataatggttagattttaagtaataaggaaatatatttcaaaatttgtgatcataaattgtatttgaattatattttgttttttgagacagggtctcactctgtcatccaggttggagtgcagtggcatgatctcggctcactgcaacctccatttccaaggctcaagcaatcctcccaactcagcctcccaagtagctgggactataggcacgagccaccatgcccagctgcattttgtattttttgtagagatggggttctgccatgttgcccagtctggtctcgaactcctgaaattaagtgatccacctgcctcagcctcccaaagtgctgggattacacgcataagccaccatgcccagcctaaatcacatttttaaccatgtttaaaatatatctacaatttgacccagccatcccattactgggtatatacccaaaggactataaatcatgctgctataaagacacatgcacacgtatgtttactgcggcattattcacaatagcaaagacttggaaccaacccaaatgtccaacaatgatagactggattaagaaaatgtggcacttatacaccatggaatactatgcagccataaaaaaatgatgagttcatgtcctttgtagggacatggatgaaattggaaatcatcattcttagtaaactatcgcaagaacaaaaaaccaaacaccacatattctcactcataggtaggaattgaacaatgagaacacatggacacaggaaggggaacatcacactctggggcctgttgtggggtggggggagggggagggatagcattgggagatatacctaatgctagatgacgagttagtgggtgcagcacaccaacatggcacatgtatacatatgtaactaacctgcacattgtgcacatgtaccctaaaacttaaagtataataataaataaataaataaataaaataaaatatatctacttatgtacacatattattttttctcttctgagcacaagtttaaatatacttttctccttattacattaagaaacataacaatttaaaagtgaatcaatgagaaagttacctattttggtgtattcatttctatgccatatttttccatttcttatttcttagagacacatatcatattttttttgttcttggtttactcattgcatacaaaagccagtcaagatgtacataatctgtgcctttattagaaaacttttatttaatttccataccattctgataggtaagatcaacttggcaatagaggagcctagagttggcctttgcatttgtggctggtgtattgtgacataatggatgcaggtagaagtgaattaacaggggctacactaacaggaaggtatagatgttgtgcacgtagccaaaggatacaccaaaggtgagaagtgaggagataagatgagcaggacagataggacaagaatacaggcatgacctgtgtcatagattttagcctatgcaagagtcccaaaatgccaggagaattagaatattgagttacatggactgattagttcatatgttggtaaaataagaacacgtaactgatttatattcctcatgtcctgttgtacagatcaatatttgaaaaaccagaatatttcttctataacatgtctcttataaagatccagtcccagccaaacaaggattaagaaaaacttattgttactgttttttaattacaaaggtaatataatacatggacatgtattcctgaagttcttagcacttattaattacaatgtatcttaaaaaacaaaacctgaataaatacttagaaaacactcattatgtagttagttttagcagggacataaatacattttgcacatattcctcatctacgagtaactcataattgagaggttaggatttatgtgcagaaaaaaattaaacagttccaaaatattatagtcaatatatgactgttttcaagctaaatgatataaaaatgtcagggactttagaaggagctatttcattgggcaataatgattgcagaaggtttcttttgagagagaggacctaagcaatataagcacaatgtgtggaatccaaacaaacaaacaaaaaatcatccctggcttttttggtgaaaattaaaatttagaacaacagaaaataccttttgagtttcattatctaatgaagcaaatgtggtcctaattttagttggaaaagataaaatctgtctttgaagtttatattatttaaatagtcaaagttttcctgattttttagtgctaaccagtaatttgcttaattcttaatgctgatcgggttttataacattaatctctatatcagaaagagtatgaaaattttacatatttttcttttttaaaagaattactcataaagcagacttcaaaacaatcgattataccaaagtctagatttccgtattcatagaccagtataagaaaaacaatggacttaacttactaaagaactgggttgatgttaaacaataaatatttctttttagttttttaaaatttttaatttttgtgggtacataattgtatgtatacaagatatataagatgttttgatacagggatacaatgcataataatcacatcagggtaaatggggatgaaacattattatttaaagaataaataataccaatatactgaaagtcttccagaaatagaagaggaggtaatgctttatagttccttttatgagatatcgtaatactgataccaacgccagaaaaagacataacaagaaatgaaattacagactcatatccatcataagcataggtgcaataatttttaacaaggtttggcaaatcaaatctagcaatatatgaaaaggattatatcatgaaaaaggtaatgattctccaaaatgcaaagtgtatataacattcaagacgatttatcataaattttttcccaaagctaatgtctagaaaggtatttcctgtgttttctcctaggattcttacattttgagattagatataatttaaatttttaatctttctttagttaatttttatatatggtgaaaggtaggggttcagtttcaactttctctatttggctaggtagctatcctagcaccatttattgaataaggagtcctttctccattgcttattgttgtcaactttgttgacagtcagatgcctgtaggtgtacagctttatctctgggttttttatccccttccattggtttgtatgtgtgttgtaccaacaacaccatgctgttttggttactgttgacttatagtttgaagttgtgtaatgatgcctttggctttgttcttcttgcttagggttgctttggctgttcaggctctcttttagttccatatgaatttcagaataagtttttctaaatctgtgaaaaaatgacattggtagtttgataggaatagtgttgaatctgtagtatggctattttaatgatattcattctcccaatccatgaacattggatgtgtttccatttgtttgtgtcatctatgatttctttcagcagtggtttattgttatccttgtagagatttttcaccaaattagatgtattcctagatatttttgggagggaaaggggaactattataaatgggattgcattttttatttggctcaaaacttgaatgttattggtgtgtagaaatgctactgatttttatatattgatttggtatcctgaaactttactgacattgtttattagttccaggagccttttggcagagtctttagggttttctagtatagattcatattgtcagtaatggtatgatagttaggcttcttctttttctattttggtgccttttatttcattatcttgcctgattgctctggctacaacttccagtactatgtgggatgggaatgttaagagtgagcattcatgtcccgttccagttctcaagtggaattattcccattcagtaagtcctcaaaagcaattacaacaaaaacaaaaattgacaagtgggacaaggttaaactaagagctccagcacagtgaaagtaactgtcaacaaagtaaacagaaaacctacagaatgggagaaaatattcacaaaccatgcatccaaggactaatatccggaatctataaagaacttaaacaaatcaacaataaaaaacaaatagcccaatttaaaaatgggcaagatacatgaacaaacatacaaaaagaagacatacaagcagcaacaaacatgaaaaaatgttcaacatcactaatcatcagaaaaatgcaaatcaaaaccacaatgatataccatttcacacccatgagtaatggatattataaaataaaaaagcagcaggtgctggagaggctgtggagaaaagggaatgcttatacactgttgatggaaatgtaaagtagttcagccactgtggaaagcagtttggagatttcttaaaaagcttaaaacagagctaccatttgacccagcaatcccattactgggtatatatccaaaagaaaataaattgttctaccaagaaaacacatgtacacgtatgttcatcgcagcactattcacaatggcaaagacatagaatcaacctaggtgcccatcagtggtggattggataaagaaaatgtggtatgtacacaccatggaatactatgcagccataaagaggaattaaatcacgttctttgcagcaatatcgatgtagctagatgccattatcctatgcaaattaaagttggaacagaaaacaaagtaccacatgttcttacttataagtgtgagctaaacgttggataaatgtggacataaagatggcaacaatagacactaggtactacttgaggagggagagagagcaggagacaagggcttaaagactatctgttgggcattctcactaccagggtgatgggatctattgtaccccaaacctcaacatcatgcaatatacccaggtaacgatcctgcatcccctgaatctaaaataaaaattgaaattatttgttaaaaggaatatatatcaatgaatattccacatcaacagactgcaaaagagaaaaatatacgatcattgtcatagatgtaggaaaagcatttgaaaaagtcagcatctattcctgatatataaaaaaaaaactctcagcaaactacaaattaagttgaactccctcaatatgagtggcatctgcaaaaaacatatagctaacattttaatgcatggtgacagacaaaatgctttccttgtggatctaaaacaaggcaaggatgttctcaccacttatatcaaacctttgactggagttcttggccagttcattttggcaaatagaagatcttaagatgtatgacagaaggtattagaactaataagtaaatttagcaaagtcacaggatacaggaccaatattcaaaatcagttataataacaaacatgttaacatatataaaacattggaaactgaaataaaataaaccattataatagtatcaaaaataggaagcacttaggggtatactttaaaaatatacaaaagactcatacaataaaacctacaacatatttctgccaaaaaaataaaaataaatacagggggaatggggatggttaacaggtataaaaaaatagaaagaaggaataatgcctagtattcaatggcacaacagggtgactatggccaaagtaattgtacattttgaaataactaaaggagtataattggattgttcgtaacataaaggataaatgctggaggggatggataccccattttgcatgatgtgattatcatgcattgcatgcctggatcaaaatgtctcatgcaccccctaaatatatataccaactatatacccacaaaaattaacatataaatatatttaaaaatgtggagacacggtgttcatggatctgaagacccagcattattaaggtgttagttctttctaaagtgagagacacaacacaaacctaattaaaattccagcagggtttttttttttttggtagaaatttagccagctgatttaaaattttctgtgaaaatacgcagggcctaagatagccaaaacaaattgaaaaggaacaaagctggaagatttataccatttgactttgagacttattctaaaactacaataatcaagacaggatagcactgatataaagatagacagatcaacggaaggaaatagagaatccagaccttacaactcaatgataaaaagatgaactacacaagtaggcaagaaatctgaacagacactacaccaaagaagatatacaaatggccaatcactgtatgaaaaaatgttccaccttattagtcgtttggcaaattcagtttcaaaccacaattagataacattacacacttgctgtaatgggaataaatagattgtcaacaccaagcattggtgaggatgtggagccacgggaacacttataccatggtggtggaagtgcaaaatagtatacccacttggaaaacagttctgtcagtattttacaaggttaaacatatttttaccatatgtcctaataattccaagcctaggtatttgcccaagagaaatgaaaaataagtccacattaagacctgtatgtgaatattcgtagcagttttattcgtaatagccaaggactgaaagtaccccaaatgtacatcaacaggtaaatggttactcattatcatccatcattataaggaaattcaactccacaatttaaaaaatatgagctactgatacacacaataacatgtatggaacttaaaaatgcttatgtgaagtgaaagaagccaaacagcaaagacataccacatgattccatttatgtgacattctataaaagacaaaattatagggacagaaaacagttcaagttcacttgctacagatggcaggaaaaggtaacaaaagaacattttggggtgagggaagtgttcttgatagtggtcttgattagatgaaatatgcatttgtcaaaattaaactgcattttaaagggttaattatattatatgtaaattgtgtcttaaaaaaactacagtagcatttcattacttataaagttcaggctctgtaacactacccagaaggccttcgcttatctggccttctttacttctcacactgaattaggaatctacttcaggttccatgaagtgctcctataccatgcttatattttactgtcatttactaccacaaagaaggttctcagtaaattattgttcagtagatgaatgcctaactctgtaccccttgtctttacttactctctggaaactattagcagccacaccaaactgatagcttttcccgaacaacatagtcacctgtttctgtgcctttgagcaagttacttaatctgtttcagttttttttctttgtgtatagtggggctaattgtgcttaactaataagatatgaagtgaagtaagaatcaaatgagatgataactgtaaagcacttagcctattaagtaatcagttctcaatgtttctggaacataataaagactcaagaaatgtcatttgtttttatcaggatttagttatttaagtggcactttagctggattttgaaggctctggacaatcgtgaggaaaattgaggacctttcacatcccacgcaggagcacagatgggtttcctatctaggggctttcccttaacacttaattccacagggaagggatgggtttcatccagtgttaattcactctcatcaccctgccttctcttttcaatgattctctcctttccatatcaagcccttatgtttcattgtcaagctccagaattattattttggtttctctttattctccctacttctcacccaatcaaaatgatagttcccatagtgaattaatacgtagttaggtctgattgtatttttatataattgttcatataatcaactgacgcaaaggcatgaataattgatagattttatccgtgaggaaagatttctattttgagagaatagcttatcaatttttttctaatagctatatagaggggaaagtctctagtgtcttatttttccatcttgttctacacaaatagaaagtctcaaaatagcctgctacatataccatcattatgcctcagtgttcagatctttgtaattttacagcctatgaaaatgagtaaattggttcatccttcaaaaaaaagtttgattagtagcataattcatagctaatatggcagactacaaatctagattatgaacatgaagaattgatatgaattcccaccacagtctgatatggagcttcataactaaatagcaagatctgccatctctttttctctcttctaaggagcataaagatgaccaatctatcaatgtgtatctttcagaaaaaggaactaccattttcaggtactttttagtgacaccagaaacttcgtgacttacttttgagattttggagccagaggaaattacactgaggtattaaatccccaatcaaagtctgtcttcttcactaagtaaatcaggatcttaaaatctaatcttacagtttgggcatgcactctttcccctagtttgtaggagatctgaaatagtatactcccattctctgatgacaaaaactgaaattaagacatagggaaaattatttgtccaaaattataatgctgctgaacaacagaacgtagatacaaactagttctcccttttgttctgtaatctatatataatgaaaaatgaatttgtctgacctatcctattgccttttctattgatgtatttttcatcaagtaatagaaattgtttatatttaaaatgcaagatctcacagtctgaggtcaaagacatgcatttaaaagataacaaactgcataaagtcagttacttccaagaacatcagaacttgcttgttgacatctattccattttgaataggatactttgttctgttaactgacttcttttttctggtattcatgacaactcttatctgttattaaacagaaaagaataggactggataaactattttctgtttctgtttcctatggaaaataaccttgcattagaaaatgaacatcacttcattcactttctgtgttgtatagatactccaagtaggaaatgttctgtaatagctattcttaaattatctgatgttttatttaccttgttttttccatgttaaatgtactgtacagttttatagctttaacaaaaatgacatgatcattaaaattctatttttcttagtgttcttcttcccacataacatactcatgcattcattcagtcatttatccatttagctgtatactattggtgatttcatacttcatgacaggtaccatgcaaatcatactggatactgagataaatagattttgtacgtcatttactgaattttacagttttagaaagtgaaagactttttaaaagaaaataagaggaaatagccaagctagtgtgataaataaatatccggaacatctgagagattgggagaggtctcttagctctatagggatgagggcgtggcaggggttataagaagaagaaatggcatatataaaggccctgaaatagcatgactcattaaaggaaatacaagggttgttcaaggatatagaataaatatgttaaagtggcagcagagaaggttagagaagtagacagacatctctatatcataataaatttaactgttatcttgtaagttgtgggtagccactggaaaaatttaactttggataacaccaatggaaaagtgaaaaatgtagatgtagacagacatttctatatcataataagtttaactattatcttgtaaattatgggtagccattggagaaatttaactttggataacaccaatggaaaagtgaaaaatgtattagaaggatggaagatttcagggaggcagaaaattatatggctgttgtaatccaagtgagaaaagattaaaatttaaacaaaagcattattacttgaaagaattaatagattaaaagtatattatggaggtaaaattcacaaaccttggtggttcagaatattcacattctacatagagtacactcattgaggcatcatgagtcttaaaagtgttaggactccttcgtggccagcactccccactataaattagtgccccaaggggaaggaattccctcagtatatgcctaaagtaacatgtcattgggattttaaagctgccaccagaagtaaagcagagaatctagcctggaactatcagactaagccaagatccttaagaaaggctgatatgtttctagtggactcttcttgttatcaccagaaacaaaagcaaaccatcatagataaacacttaatgactaaatatatgagaccgaaagccaatatgcatgagaatcatcaagggggaaaaaagattttagatctctaagggctgcaaaggttagaattgtgaaataaaataaagcgcaaaatagaatgaataaaaagagaccattaaaaatgaagaagaatatttggaaaaataaaacttgtagaatttttaaaatacaagttggaaaaaagatgtttattgatgattcatcagattagacaaagatggaggtaattagttaattggatttttaaaattttttatttttgtgcatacatggtagatgtatatatttgtggggtacgagatgttttgatacaagtgtgcaatgcataataatcacatcatggaaaatggggtatccagcgcctcaggcatttatcctttatgttacaaacaatacaattatacttttagttatttttaaatatacaattaaattattattgattatagtcaccctgttgtgctattcaatattaggccttattcattctttctaattaatttttttgtaccattaaccacccctacctctctccaactcctcaataccttttccaacctcttgtaaccatctttctactctctgtctctatgagttcaattgttttgaattttagatttcacaaatgagtgagaacatgctgtttgtctttttctgtgcctgtcctgtttcatttaacataatgacttccagttacatcaatgttgttgcaaatgacagggtctcattcttttttatggctgaatattactccattgtgtacaagtactgcattttctttatcaattcatctgttgttggacatttaggatgcttccaaatcttggctactgttaacagtactgcaacagacgtaagagtgtagataactcttccgtagatcgatttcctttcattggagtatatacccagcactgcgattactagatcaaatggtagatatatttttagttttttgaggaacctccaaagcattcttcttactgggttgtactaatttacattcccacaaacagtgtatgagggttcctttttctccacatcctcgccagcatttgatattgctaaagtttagataaaagccattttaactggcatgagatggtatctcattgtagttgcttgtttgtttgttttgggacagagtctcaccaagtcacccaggctggagtgcaatggcatgatcttagctcactgcaccctccaactcacaggttcaaggaattctcctgcctcagcctcctgagtagctgacattacaggtgcccactaccacgcccagctaatgtttgtatttttaatagagatggggttttaccctgttggccaggctagtctcgaactcctgacctcaggtgatccacccaccttggtgtcccaaagtgctgggattacaggcgtgggccaccatgcccagcctcgttgtagttttggtttgcatttctctgatgatcagtgatgttgaacacctgttgatattcctgtttgccattcgtgtgtcttcttttgaaaaatgtctgttcaaattatttgcccatttctaaatggattattagatttttaccaatagtgttatttgagctccttatatattctggttattaatcccttgtcagataggtagtttggaaatattttctccaatttatggattatctcttcactttgttgactgtttccttcgttgtgaagaagttttttaacttgatgtgatcccatgtgttcatgtttgctttggttgcctgtgcttttggggtagtgctcaagaaatcattggcctgaccagtatcctggagattttccccagtgttttcttctagtagttttatggtttgagtttatggatttaaatctttaatccattttgatttgatttttatatatgatgagggataggggtctagtttcattcttctgcatatggatatccagttttccccacaccatttattaaagagattgtctttctttggcacctttgtcaaaaatgagttcactgtaggtgtgtggatttgtttctgagttctctattctgtttcattgctctatgtatctgtttttatgccagtaacatgctgttttggttactatagctctgtaatataatttgaagtcaagtaatgagatttccccagttttgttatttttgcttaggatagctttggctattctgggtctttggtgattccatgtaaatttgaccattggcttttttctatttctgtgaagaatgtcattggtattttgatggggactgcattgaatctgtagattgctctggatagtatggtcattttaacactgttgattcttccaatccatgaacacagaatatcattccattttttgatgttctctttgatttgtttcatcgatgtattataaatttccttatcaagatctttcacttcttaggttagataagttaggtgtattgaatatattttcaacttacagtattttagacttatgatggttttattaggacacaacttcgtaagtcagaaaacatctgtgtagattaattacacatatattaatgttaattaatgttaattaattaacatcctaggagatgttactgccttaggtaaaagataagagtttaggcaaatagtgcgttaaccaaaagtttgggaggaacagcttggaaataggtacataagggctttgaaaagctctaacatatttatggaagtctaaaaggctattcgcatgccgggggctacatgcatcctctggacagacttaagaaggccttaagctttcaccttctgctggccttgcgacaatatggaaacaggaagtaaatgctaaggtacagttgaaacctgcctggttgattattgaagggctgtccttacacagagttccttaggaaaatctgggaggttttttctatccaggaatttaaggaaatctctattcaattattagctgaccactaaggtaatgaaacacagatttcagtggccacacatgacaaagaatgcaaaccatacaaaattagttaagaaaaatcactcatcagataatgaaaacaccaacaaatcctagggaagagagagaatgagatttcaagaattgccatattataatactcaaaacatcattgcaaggagacaaattaaaaagtacgacccacacacagcaaaaaaccaaatcaatagaaactctgcttgaggatatattgcctagaactttctaaacacagacattaagtttttaaaatatgttccactagtcaaagagatatgcttatacactattggtgggggtgcaaattatttcagctattgcggaaagtagcgtggcacttccttaaagagcttaaaacagaattaccatttaacccagcaatcccattactgggtatatacccaaaggaatataaattgttctaccattaagacacatgcatgcaaatgttcactgcagcatcattcacaatagcagagacatggaatcaacataaatatccatcaatggtagactgggttaagaaaatacggtacatatacactgtattatgaagccttaaaaaaaatgaaaccatgtcctttgcaacaacatggatagagctggaggccattatcctaagcaaactaatacaggaacagaaaaccaaatactgcatattatcttttataagtgggagctaaacaatgaaaacacatgatactaggaggtaaatagcagaccctggggcctacatgagggtagaaggtgggataaaggagaggatcagaaaacatacctatcggctacagtgcttattactcaggtgacaaaattatcgatacaccaaacccctgtgacatgcagtttgcccatataacaaacatgcccatatacccttgaacctaaaagttaaaaagaaataacaagggaaagaaaatgctacactaaaaaatatttagttagtacaaaagaaggcaagaaatggaagaagaaataaataagacatattgaaaacaaatagaaaaatggcagaagtcctttcttatcgataaatcagtaattgcactaaatgtaagtgaaatgaactttccaattaaaacactgagaattgaagaatggattttataaaaaggattcaactgtaagctgtgtacaggaaacagattaatagacacaaacaggctgacagaaaaatgattttaaaacgtattccatacaaatagaactcaaaagaacggatgactatgctaatatcagacaaactatattttaatacaaaaatcattacagtgacaaagacattatataatgttaattatgtaaatccatccataagatatcatagttttaaaaatatatgcacttaacaagagacccctaaaatatatcaagcaaaaacatacagaactaaagggagaaataaataattcaaatatgttacttggagactttagtatcccattttgaataatggatagaacacctagactgaaacaacagtatatgtcacctagacctcccagccgtctatagaatatgtcatttaacagtagcaggcacatgttcttcacaagtgcacatgaaacattctgtaggacagaccatatgtggccaaaaaacaattctcagtaagtttaaaaaggttgaaagcatgcattttatcttctccaaccacaatggattggaatttgaaatcagtaagagaaggaaatttgaaagattcacaaatgtgtggaagttaaacaggaaactactaaataaccaatgggttaaaggataaattacaagagaaatgacataatactttgaagaaatgaaaaaaaatcaaaactgatgggatgcatttaaagtagggctcagaaggaaatttatgactataagtaactacttttaaaaaggggaaataagaaaacattaacataacctccccgcccccaacaggacaaactagaagaagaggagcaaattatttccaaaacaggctgaagaaggaaaaaatagcaattaaaatataaataaagcagagaatttgaaagtaataaagcttaataaaaccaaaagttgatcctttaaaaagaccaacaaaattgaaaaaactttagctagaaaaaaaagaaagaagactcaaatcactaaaatcgggaatgaaagtaggaatattattaatgaccttaatgaaagaaaaaagattataagggaatacttactataaaccattgtgtcaatactagaaaactctacatatgaaatggaaaaatttctggaaacataactaacactaaactaaaactgactgaatatgaaatagaaaatctgagtattgctgtaacagtaaggagtttgagttagtaatttagcaaaacttccaacaaagaaaaattcattaccagatgttttccctggtaatgctatcaaacatttgagacgaaagagaatcaacagcagtccttctcaaactctcccaaaacatagacgaggatgaaacactaactcattttatgaggcgagtattacccttaatgataccaaacccagataaagtcgtttgaaaagtaacaaaccggtatctaccacgctattaagtaaaggttaataaaactacaaatcttatgactatggatgcaaaaatcctgaacaaaatactggcagatctacgtcagcaatatgtaagaaaggattatataccttgattaaatgggatttattccaggaatttatagttggtttaacacatgaaaatcaatcaacgtaatacaccatattgctgaaatgactgggagaaaaacacatgatcacatcttaatagataaaatcatttgacaaaatttaatactgtttaatgataaaaatactcaacatattaggaaaggaaggaagctttctcagtctgataagtgagatttacaaaacaaaacaaagaaccccgcaatgaagtcatgcttatttatgaaagactgaatgtattcaccctaagggaagaagacaacaatggccactaatactagtgctattcaacattatactgcaggttctagctagtgtagttaattaagaaaacaaaataaaaactgtctaaattgaaaacgaagaaacaaaactctctatttgtagaaggtaggacttatatatagcaaaccttaaagaaactaccaaaaaaaaaaggatctgttagagctaataaacaaattcagcaaaatggcaggatatgagaccaatatacaaagatcaattgcatttctatacaccagcaatgaaccatctgaaaataaaattaagaagatggttccattaacaataaagtcaaaaataataaaatgtaacaatgatattaagtaatgctcaacatcagtagtcattatggaaatgcaaatcaaaagtacaataagctaccactgcataaccatttggatgggcactgtagtagtctattcttgcattgctataaagaaatacctgagactggataatttataaagaaaagaggtttaattggctcttctgcaggctgtaaaggaagcataatgctgacatcttcttggcttctgggaggcctcaggaaacaaacaaacaatcgtggcagaaggtgaagtgggggcaggcatgtcttacatggcagaagcaggagcaagagagaggtgggaggtgttacacacttttaacaaccaaagttcatgagatctcacactctatcatgagaacagcagcaagaggatatttctaaaccattcatgagaaaccaccaccatgatccagtcacttcccaccaagccccacctccaccactggaaattacacttcaacatacaatttgggtgtgaacacagatccaaaccatattaggcactatcaaaaaattagaaaataatgagtgttagtaaggacatggagaaactgaaacacttgtacattgttggtgggattgtaaattggagtagtcactatggaaaacagtattgcagatcctaagaaatttaaaaatagaattgccgtattatccagctattccactgctgcttatgttgccaaaagatttaaaagtagggactctaagtagtatttgtgcccctatgttcatagctgcattatttgcagtacttagaaggttaaagcaaccaaaatgcccattgacaagtgaagcataaacagagctctttatacatacaatgggatattattcagccttaaaaaggaatgaaattctaacacattctacaacatggatgctaaataaaataagccagtaataaaaggacaaatactgcatgattccacttgtatgaggtacccagagtagtgaaactcacagagacaaagtgggatgatggtggccaagggctgaggatggaggagcaggtaatggggaattattaatatttctaaataggtaaagaatttagattttacaaaatgaaacaagttctgttaatggatattagtgatagtagcaaaacaatgaaaatgtgtttagtaccacttaactgtacaattaaatgctgtaaattttatattatatgtattttattacaattaaactttttttaaaaaaggaataaatttagccaaagaatgtcaacacttgttcatcaaaaaccacaacattattgaatttctttcaaacattgttgaaagaaattaaagagggtataaataagtggaaatacctcccaggttttaatggattggaaaagttaataattttaagataacagtacttttcaaatttatatataaggtcaatgcactctatcaaaattttagctgtcttttttcagaaatggaaaagctgattctaaaatatggaattgcaagagacataggataaccaaacctatattaaaagaataaatttggaggacttatacttcttaatttcaaaacttaatacaaagctacagtgataaaaacagtgtggtgctagttaaagatagtcttacagacaaatttaatagaattgagagtccacaaagaaacccatatacttatggtcaatttattttcaacaaggttgccaagacttttcaaaatgactgtccttaccattgttgaaaagacggtcacttcaacaatggtgctggaacaactggatatcaacaggccaaagaacaaatctagtctccaaccttacactctatgaaaaaatgaattcaaaatgcatgaaagacccaaatgtgagaactataactattagaaggaaacatagttaaaaatcttcatgaccttgaattacccaatggttttcatagatatgacaccaaaaggacaagcaaaaaaaagtagattgatagtcatcaaaatttaaaacttgtgtgtcaaaagacattcatttacaagatagtgaaaatataacagcagaattgaaatcaatgtttgcaaatcatgtgtctaataaaagtctaatctccagaatataaaagtaacccttacaactcaataataataagacaaatggcccaatttaaaaatgaatagaagatacaagtagacatttctccaaagaagacatacaggtggccaatggacacatgaaaagattctcagaaatgcaaatcaaaaccacagtaagataccacttcatattcattagaatggctataatgtttaaaacagacaacaacaagtgttggccaggattcacagaaattggaaccctcacactttgttggtgagaatgtgaaatagtacagccactgtggaaaagagtttggctgttactcgacaagttaaacatagagttaccatataacccagaatttcatctgtagatacatcctcaagagaattgaaaacatatgttcacaaaaaactattcataatagcataattcctaattgcctgtaagtggaaacaacccaaatgttcatcaactggtgagttggtaaacaaactatgatatatgcataaaatgggatattgttcaccaataaaaaggaataaggtactcatacttgacatggatgaacctggaaaatattgtgctacctgaaagaagccagacacatattgtatgattccatttaaatgaaatgtctagaataggaaaatccatagaaacagaatgtagactagtacttaccagaagaaaggaggaagaggaaattgaaactaactactactaagtataaggatttttgcagaatgataaaaaggatctagacttatatagttcgtggttccacaagatagtgagtatactaaaaaccactacagtgtacatttttaaatggagaggattttgttatgtgaaatatatctcaattttaaaaatactttttaaaaattagcatgaaatgaacttttagcgataaccataattttagatggtttatccccaagagaacagcaactaagaaacttacaatgtatgcatgtcaggacagcataagaaaatctcataatgacaaaactatacaaggagaaaagtatgcaaacaaattggtaaatttgtgtacatctacgtagaaattgtctttataaagggctaatgatatgtaatatgtgagtttgaactggacaatattgggcaatagcttgtaagttagaagggattgttacataatattgttgcagaagaggcttatgatgttatttaacttcatacttatttaagttaactatacctggtaaaagcccaagcatagcaatgaaaagagtagaataaatacatttccaatcagtagggagtaaaaaagatggaattaaaactaaagtttctatccccaacccctccccaccccaataaaaagcattaaaaaactgggaccaatggaagatttttaaagtattgggctagaattaaatacattatatatcaataagcacaataaatataaaaggactatgatttccaattaaaaaccaaatttctcagatatgattaaaactccaggtgagttccatttattaaaggcatacctaaagccaaaagaatgttgaaggtaaaaagatagaaaaatatatcctgggcactaatcaaaaaactaagctgacatagctatattgatattttaaaaaatatttcaagggaaaaattgttagtgaagaactaagttgtatgggtaggaagagctgaattttcttaagtaagatgctaccatcctaaattcatgtatttcaaataaataacctcaaaatgtgtaaagcaaaaattgatgaaacatcagggagaaaatgacaaatctgccatctttgtggaagatttcaacactcctatctcagttatcaaaatatccaggagacaaaaaaattcagtgaatatatacaagatttgaataacataattagcatttgatactattgatatatagaacttttcacccaatcatagacagtacatattattctcaagcaaacatgtaacctgtgtaaaatctgatcacatggttcaggggtccccaatccctgggccacaggctagtaccagtccttggcctgttaggaaccaggcagcacagtagcgggtgaatgacttgcaagagaacaaagcttcatctatatttacagccacttcccattgctggcatcaccgcctgagctccgcctcctgtcagatcagtggcagtattagattatcataggagcatggaccctattgtgaactgtgcatgcaagggatataggttgcatgctccttatgagaatctaatggctgataatctgtcactatctcccatcacccccagatgggaacatttagtcacaggaaaacaagctcagggctcccactgattctacattatggtgagttgtataattatttcattatatattacaatgtaataataataggaataaagtacacaataaatgtacttgaatcatctcgaaaccatccccttccacccacactggcccgtggaaaaattgtcgtccatgaaactagtccctggtgccaaaaaggttgggaactgatgacatagttagatcataacacaagtcttaccagattttaagaattagtgttatcaataccatgatatctgaccagtgtaaatttatatttgaaggcgaggacaaataattatattaaaatattctcattactgctgaagaattttgaacacttaacatatttcaaagaaacataaaaagtatttagactaaacaataatagatatactaaatacaaaaacttgtagaatgtaaggaaaatgaaacatgaagataaatctatttgcgtaaaagcttattacttgagagaaaagcctaaaattaatgaactaaatctctaactgcaaaaaaaaatgtccaagttaggaaaataacagaaccccttcacaaagtagaagaaagctaataataaagaagtttaacagaaatcagcaaaatagaaaaataagatacagtggagaagattaacaaagataaatgtttattcattaactaataataaatgagcaaactcttctaagattgattaagaacaaaataaaacaacacaaatagtgaacatacagaatgaaaaggagacataattataaccaaaactaattagaaaagaaaatgagagtgctatcaaagcattataccattaaaattacaaatttaaatgaaatgagcaatgtcctagaaaatatacagcttcctataactgaaaaagaagaaacaaaaccctaaatagttctttaagtatgaaaggaagttaatcagtaaaatttcttcctgtagagaaaactctaagcccaaatagtttacaggaatagtctaccaaatgttcaagtaaaactctgttccaaacttacaaactcctagagatcagaaacagggaatgttccagattgttcactgaggactgtgtaatcttaattataagagcaaacaaggaaaatcacatgccaatctcccttatgaatatagatctgtaagttctaattaaaatattagcagaactcaattcaactgtgtataaaaagataacatgtgtatgtggggcaaactggaagacggtgatgagggaaatttatcccatgaatgcaggagttgttcatcattttaaaaatttctaaaaatgtcattcatttatcacattaaaagtgaaaacttttatgatcatcttagtaggtgcagacatctagtaaaggtcagtaacgttcatgattagaaagaatactcttagcaaattaagaatagaagagaattttgaactattttaatttaaaaaacaatatctacagaaaacctgcagctttatttataaaactcacaagcaatctgaacaacatattgctttggcatatatacatatgtgagataaaatggtttgttaaggaagcaagagactgataaataccaagtgcagcagagtggtttatttatttatttatatatttacatatactattatttttaagtgagtgagcttaggatagtaaagacattcgtgtcgcctctcaaaacctgagttaaaaacaacttgactgtgaaaaagaaatatagattttatcctcagtgaaaattcattttgttactttccttagcagtctagatgtaagactgagaaaggagaccagtgtgttaacccagggtcacacatctttgactccagtgcagcaggtagatcaggaattaagtgaaggtgttggcaagagagtggttaaaacatggaattgtgggatcccagatggatgcaaaaggaagtgaattattaagcagaagaggaaagagagcagcaaggataggagatcatgatctgagagtagacttaaagcataaagacttgtgaaatgaagctacttatggccattggatttatttgctgaagtaagggagacttgaagatcttttgagttaatcagtcaaagaattgtgagctgctgtgatcaatgttttccatgtggataatggtgtcattcagagtggtgtcaagagtcatggaaagataccttctcttcgtgtaaataaaacatcatagatcagttggcagaactcataagtgcccaagataggggaacagactaaaaaactgatacaatttctttggtgtgtctgaggacaggagtcttttgttacaaagcctccacccccacagccatgctgctttgcttttctaatccactgctttgctcctgggaatgatatgtattagccagccagaccatgtacccttcccttcctgctgtctcctgttaatctatttaagttttgtaatttgcactaatttgcacatattagatttcttcctggctttcttcagccttcagcatgcactagacaaagccattgaacgaaatattctaatatcacatctcttctctcttttgaagcctctctacaaaatgtaggctgataatatgatcaaaagttaataatcagagtttacgtgatgttcttttttagcttcttttaattttccatttccctcagtgattaagactgtatgtttgtttgccctccaacgtcatttacagaggagtttttatcttttttcctaagtattgtcacatctaacagatttccataacctttgtattcttttaataatttgtgttgtggttaacttttagactgaaaactggacaactttcccattagaatgtgtctatgtccccctcaacagattggagagatagctgctccatgcttctaggaaatatctgcagctatcctgctgctatgcaagattttactggtgccgctgtcatattgtcagaaccgttcccactggtcctagagtgacagagtagttatttaacctaaatcttatcaaggagtgattaaatctatatctgagcagacatggattttagacggatttctactgagaactatcttgagttcagtgttgctcagtatttacattaccaccctaaaataaaggaaccattcacctgtcggtttttatggaagatgccacaaagatattgcaagtaatttggtgggaagatattaaaacttcatgttttgtaattcaaccttgatattagaaagaacaaataaatccagtatagtcacactcacctcaaagacatatgtaggcttttaaaattatatttaaacaataaattagaaatatcagaatacataatgatattttgtttcttctgcttatatttatgtatcagtaaagaagaaagtttgccacaggtagacatgatatagtgaagaatataggaggaattactaggacttagtatttagtaagtacagaaattaaaacaaagttaaacctatttccatctgatttatatttatgaaaacttgagcaaaaaaaagttgatatatttcattaatgagcagtgaaaaaaagtaatgctgttattgaagtagtactcctgtttaaaatccccggaaagaaaaactggacaatgaaggaatatgaggattagaatgaaatttaaaaaggacatagacaaaggaactgaaaccacttcttaagcttgccctttaaggaaaacccagaatgacttgaaggtagctttttaaatattattttttttaatatgcagtaattacttaatgcaaaaaaaattgaagaagacacaaaaaggccaaatcattgtttttaattgacacagtgaaaaacaaaatgatattagttattataatcaatattatcttcccctcctcttcctcctcctcctcttcctcctccatctcctccatgatcatcatcatcatgtggcttaaaccagtaatcagtttttttctttcttatgattctcattgcctgggctcagctaagcagttctctctggctccatgtggagttgcctgggtctgcagtgtcctgaatgtgacttactttgggctgagacctcatttaggcctgagagcccgagcaattctgtgctcttcaatgtgctccatgtgatgtgggcttctctcaggggagcaacagactccagaagagagagttcaaaaaaaatcaaaagctgcctggcatcttatgtcctagcctcaggagtcacatagcatcacttctgctgtattctgtggctcacaggaagtcacagggcaagtccagatccacaaggagtagaaaaagtctccattttttgatgacaaagtcacactgcaaaagagcatgtgggatgggaaatgttgttgcagccatctttggaagtaatctctgccacatgttattaaagaagttagaagaagctcactgtgtgtacatgtgaaaagatgtccaagatacatttctatgtgagaaaagctgggtaaagaacagactgtataatgtactaataattatcagtgttaggaagtgtgggaaaagaatatatttgtatttttatttatatattttagaagtctctgaaacacacccaggcataacagtgggtacctgttgaggttgaaaatttggtgactaggggacatagtgagaggcttttcactgtaaaatgttactacacattttaaaaataattcgaatctcctaaataagtaacttctgtagttaaaaaagtcagctatatggttgaactttaactgtagttccatattagaatttggaatctcagcatttaaaagaattttagatgtcatttagtcctatcatctgcattatttaaagtaagaatctacatggtttatctgaaattcaaatttaactgggcatcctatatttttaaaaattttattgaggtacaatataaaaaaataaaaataaagtaagaatctagtctgttgatttcctaaagtgtggtcattgaacttatctgtgaaaaattacctctaagatagtgacttctgttgcataaccatttgaaaacactccaaccaaaattttttatttttgaggaacctatcttaattgaattaactgaattgctgattaacaagacacactatttaacagaggaattggtgcaacagttttatgacatctttctatatttcacattttactgaatcataatttaaaatatattaattttatatctagctttatctaaaacttatgtatatttgaagtactgaaatctgattattgaaaaaaattggactgaccaaagctattaagaataatatttctaaaggtatttttctttttagattactgtgccatgctatgaaggaccatatagtccgtgttgcaaatgaagctgagtttattttgaacagacaaagagccgaggatgtacataaacatgcagagtttgaggtaaggttttgggagtagactaaattctgcctttctattataagccaaaaatcacctatctgtgaccttacataagaaggtttttttaaaaggaaaatttcactgaaggcatttctgttcctgttttttaaaagctttagtaaatgtcaaacagagtactaatatattttcaccccatttacagcatgaaaacattccttctgccctatatatgcctaaccatttggtagactgaagttattctaacctactcaagagtaaatgcaaaaaataatttataatgcaacaattttagttattttaagctagcagagatttacacaccaataggtagatatgagtatatgatacagttatatgaataaactcatataagattcaaaaaaatctttcaatttctgttttatacataacagttatttattatttcagtttattccatttacaagacaaaataggtccgagaaatatttatgtgccctgctgtttggcttagttggacttgaaagtaataaatgactcaccaatttattctcctgatacaacaggctaacaagtatggtgtagctagaaatcagagcccacaattctagttttgatgaggtttttatctcagtaaagcagctctgtgagtcatacaagttgatagactaggtctagtgatctctgacctagctggctgaaaagcatgagacaggaaaatagccactatcgctttcaaacacatgacctttgcttcatttggtcagaagaggcacaagacaagcagccacttgtcttgtgaaattgcaacaaccgtattctgagaaagataccagatattttaaacttcgataaaagtatagtgatctttaagtgtttatcaaagtgaagtttcgtattagtaaagatttggaatctcaactgaattccctgcaggatcagttttgagtctcttgtatttccactaagaaaatcaagataatttgtgaggatataagcagatcaatatttgtcatgtgaaaacatttaaaatagattttcaagtggctagatattagttatgagctttaacatgtttaaccaaggtgacattaagccaagggcagtgtttctcaaccttttttattgttgttattgattccctaaggagtccttttagacattttgcctaattggcctctcatcccaaagaaattttataataccacccataggctgtgtatctgtttttgtacttacatacatttgtgttttatgtactgaaataacaatatttttatcccccacccgacacacaccaatttttcactcttaggaatgagattactctcgttgtgggtcatcttcccaaggtgataagaggtttccaaggaaacatgaagacttagtgttttttagattttataaacataaaatataatattaatgtaaatgtaattttgattatattgccagtgttatttgatgattgtaccttatttttttaacctgaaatgtttatatctctcctttttgggttagagctattgatgtgtgtgtgtgtgtgtgtgtgtgtgtgtgtgtgtgtgtgtgtgtagtttacacaaagatatcccttttaaattgtaaaagattttacaagtcatgacattttgctagaactttttgaggaatttttctatcccccatatcagcctataattaggaagaaaagtatatttgattttagatgggtacttcacagttaagtttttttagttaactactgtagttgttaaggaagaaaaatgaaaatttaattttactctccaatgagctaatgaaatattaacctcattactgaggcagatcgttgtactaattggtgattccctgtacaaaaagataaattggaaaatgaattaatccttcttagattactgtagggttatttctccagaagagattacttgtggtagtagtgtatatcaatagataaatgagaggaatatgttcaagtaccttccatgaaatagatttttgcatagtaatgatgaatgtgaactacttctatttattttatcagatgtatgagacttttttcttcctagttatattacttgtattacacatttattaatgttaaaagttatagtcacaccactctgtatatttattgtagttttctgtataaaaactacaataacaagaatcaaatttataattaaagaaatatttctctttatgtttacattaaatatttttaatacaaaaaatgatccattgatagcagtgttgctaacaaatgtaagaatgaatacatgtcagatagctgacatgacaactgataattatgggaaaaggaaggtaagaataaggtagtagttctcatgaaaccctttgaacacattacattttaagaatatggagggatcatagaaaaaaatcttgtctcagctcctcatttacaaatatgaaactgagtacattaaaatatatggagtttgcatattttgtgaattaaaatctaggtctactgaattcctaaatgaccacattttcttctgtatcacattaccattcatgaaatggaaaatataaattaaatgacagatttttgattcatatgtaattatcaggaacatacctcttattttaagtgagatatactatattggcttgataaacaagtaggtttacatttatagtaaatatttgtgcttctaaaatacatgaaaattagattctcagaattggaagaaaccatgagtctttaattacttcaatattattcaaattattttacatatactttagaaagagcacatttttatatttgaaaggtgactatatgtattctttagaacaaaatatcaaaagattacattatttgagttttaaaaagttgaattcctgttaccgtttaacttaaatgtatatcatccttacttatatgcagtaaaaagtttattattatgcatcatttgtatttctttatagtcacagtgtgcccaatatgctgctgatagaagagaggaagaaaagatgtgtgaccatcttatcagtgctgctaaacatcgagatcatgtaacagcaaatcagctgaaacagaagattctcaatattctcacaaataaacatggtgcttggggagcagtttctcataggtgagttataataaattcgagtaaataataattcataggttaattataatagttggtaataaaaatatggctacaaatttaaaagtcatttagaaaatataatttaaaatataaaaaattacttgaaaattttcctgaaatctttaataattcttcatcagaagagtttaagggaaaacctaaactttttatagtagctacagtggaagttatttctactttataataatatgcaacataatacaaaatatggttaggcaagtattttagtctactgtctctcatatgtaacatggatgtttaggtatgagaagtggctctttttaaaaaagaatcttttagagtcaactcttcctacttattaaatttatatcattcttttttatacagaagcatatataagcatatactacagagaaataatatgttcttttaaaaagttttctttcataattttctattcagtcttaccaagggaagattttcatctcaaatatgattgtttatgataatatagtacaactaaaaccaaaatttggttgtttataaatcacaaatgttctccctaaagttttgtggacatacaattattgttgttgttgttgttgttgttatctatacaatgaagttttctggaaaactagaagtgaaacaggtcactatatttagattgctgatgttcttcctttttatattatgttttttgaccccactaaatgtttttattaagtctgtgtttggcagagtttattaaatctgtttgacaaagttggctggtgaaatgtaaacgggatactactaagaagagccttggtaaaaatgattctgttgacctggtgcgatggctcacgcctgtaatcccagcactttgggaggccaaggctgctggatcacctgaggtcaggagtttgagaccagcctggccaacatggtgaaactccatctctactaaaacacaaaaattagccaggcgtggtggcgggcacctgtaatcctagctactcaggaggctgaggcacaagaattgcttgaacccaggaggcagaggttgcagtgagccgagattgtgccacagaactccagcctgggtgacagagtgagactttgtctcaaaaaaaaaagattctgttagagaaaaacacctagaatatgagtaggatggtatttaaccaacttcctgggattatgagtgtaagataggttttttaaaactttattaattttggatttaaggtaaaattataacatgtgtctttaaaatagtcagcatttaatatttatcataataatagcaataacccatggcctctaacatttattatttgttgtgtgcgagggaccatactaagaactttacatggattatttcctttatccttgaacatctttattaagggtgacattgaggtattctccattttaccgggaagaacctaaagctgaaagaggttaaataaaacttacatagtatcacactgcttgtacaaatagaggcagattatatcagtcaggatgctccagagatatttatattcattaactaaatttattttaaggaatttattcattcaatcatgggagctggtaagtctgaaatctgtaggacaggctggcaggctagaaactccggcaagatttctgtgttacagtcttgaggcagaatttcttcttctccgggaaacctcagcttttgctaaggccttcggttgattggatgagcctttcccacattcttgagggtaatatcctttacttaaagttaactgactgtagatgttaatcatatctacaaaatacctccacagcaacagttagactaatgtttgaccaaacaactgggcattatagcctagccaggttgacataaaatttaaccatgaaacacactaacaataacctgagcattttacccatctacagaccttgtctccctttttgtgtcagctgaattgggtttatctattaatacttacttatatgtagtcaggactgtaacattatattgctagtaacgcagctggtatgattcaggatattgccttagctgtataaagcagtacatggtttgggttttaattatttccttatgtaattagaatacagctaaaggacagtgacctccatagcagcagtcatgtggtaacatgtcagatgcgtcctgtgctagctagtcaacaacctttctgacatctcattagactgacagaaagcatggcctgagccctcagaagagcaggtgtcttctttccttgcacattagtttctactgccaactatctgaaaaaaaaaccacaatatttttatgatcatttactaactgtgtcactgaactctaaacctttaagcataggttttgttctgtttaattctccttagtatttgattaactaatagggctcagtcattggacctcttctcttttctatcttattcactctctagacaattttatctagtcccatgatttaaaaatactactaatatgttgataactccaaaatttattattccaagtccagatctctcccgtcgccaggtctgtatattcatctgcccacttggtatcttctaattgattagctgatagtcacctcacacctaacatatgaaaactaagcttctaatattttcttccaaaccagtttctcttatatttttctccatctcagccaaaggcaactccattcttactgtttctgaggccataaatgttgctctgtccttgactactgtttacacatcccacattgagcccttcagcaaatcttactgacactgccacaaaatatatccagcttcgactgcttctcaccattaccttggatcaccttagtccaagccacatcattctcacttgacttattgtaccagcatgatatatagtcttatttttatatttcacttgacttattgtaccagcatgatatatagtctttctttttatatttttcccctgtcctcctaaagtccattctcagcgcaacagcctgagtgactcttattaaaatgtagatccctctgctcctatgcttagaaacctccacagctgtactatgccagactgtaaccactagtcatgtgtggctattcaaatttaattaattaaaatttaatttaatgaaaaacgtgatgcctcagttgcactagccaaatttcaagtactcggtagccacatgtggctggtggctaccatagtagttatcacagaacctttccgtcattgcagaaagttcttttgaacgcttgctgcagaggtttagcattcactgagggggaaaataagatctcatagtgacttattaggccctacatggtttagtctttgtttgttaactcttcaacctcctctgccaatactctccccttggttctttttgttctagtcaccctggcttctttcttgcaggtcatgtttgctctgtttagaatgctttcccaaaaagttcattggtcaaactttttcattttcttcaggccttaattccaaatgataccatctcaaaaaaaaaatcattctctagccactctgtctaaaattttactcttcctccaaatattttatattgcatttccccacttttcaacatctattactttgatactaaaatttcatatattttacttatatattatttttattgttttgttttccaatagcatgtaagcttcataatgtaatagattctttgctcttttatccataattgtatccccagcacctagaataagccctgatgcatagtaggtaccaaaaaatttgtgaataaattaatgaataaacacttggtgtatgcccttttttcagtaatgatacctatcatggaataatagaaaataaactagtccattgggaataattttatattttatttaactttataaaatgccaaaaagtacttatccctgcatgaaaccaaagtgttagagccagcaacactctaaaacaggtgttcacaaatccagtaacattttacatagaaaagtttatatattctaactggagtcacaagttcctcaaaaagacaggaaaatatttcaacagcaaaagttgcttttgaatgctgtttattctgtgaatgttacagatttggtttttgtataaattatcaacttctatatattatacagtgtacgtttctactacagaatgatgctttcaacttgtaaatgcaagaaaaatatgtggccatattttccattgctaatccaatgggattaatacaattgtgcatgtaagaatatttatgtcatacttaggagtaactgaaaaatattcttccatattagagtgaccgttgattttttgtttggagttcatcctactgaacttctaaactgtatttgacagtcttctatgaactctattcttttgatctcttgtgtttcaccattacgtctgacctcacatcctgccatgcatcttctcagcccatggctcactccaccacagccaccctggcctctgtctgttttgtatacaggccaagcacttcctccttttgtatgctgttccttctgcatgatatactcagataggtctttgcacaagtgtttcctcattagagtggatttctctgacctttctatcaaaaattgcacaccacatttttcccttcatcactccctaaattttctaagctttaatcttcatagcacctatcacttggcatataatttactgtttaactatttttttacctgatattatggactttcatttactggtgtgtacccagtgcatagaactctgcatataataattgttcaacacataatttaaaaattcatgaatccatgaaaatttccatacacatgtatcatggcacttgtgtagatagcatgtaagctagttttgatactttccacatagaatttgagctttataatcaacattaagagctcaattacttactagctgtatgacttgtaagctgtgtaatctcgaacagagaggtttttttgtttttcttttttgttgttttttttttaacttttaagttcagtgatacatgtgcaggtttgttacataggaacacgtgtgggggtttgttatatagattatttcatcacccaggaattaagcctagtatctgttagttatttttcctgatcttctccctcctcctaccctccaccctgtcataggccccagtgtgtgttgttcccctctatatgtccatgtgttctcatcatttagctcccacttgtaagtgagaacacgtgggatttggttttctgttcctgtgttagtttgctaaggataatggcccccagctccatccatgtccctgcaaaggaaaggatatcattttttgttatggctgcatagtattccatcatgtatatgtaccatattttctttatagagtctatcatttatggccatttttgttgatttcatgtcttttgaacaaagattttaccttcctgatgttcaccttttctcattcagaaaatgggatgaatagtttctactaaattgagttacgttactatgaaaaattgaaatactgtgtgcaaaatgcttaatataatgtcagacacaatagatatccaatgcttattagtagtctcttcttttttctgttagtctgctctttgcaaagacccttttaaaaatattttctgtctgcttaatcactccttaacttctaatatatagttgtaatatgttgattttatttgttttatcaacagataattctttttttcaattgagatggagtctcacgctgtcacccaggctgaagttcagtggcacgatctcggctcactgcaacctccacctcccgggttcaagtaattctcttgcctcagcctcctgagtagctgggattacaggcacgcaccaccacacccagctaatttttttatatttttggtagaggcggggtttcaccatgttggccaggctggtcttgaactcccgacctcaagtgatctgcccgcctcaacctcccacagtactggggttataggagtgagtcaacacacctggcctcaacaaataattcttgagcttctatttgtgcaaaacagatatactttctccccaactgagcttatagtctagtagaagagattgatattgaattaataattatagaaacaggccaggcaaggtggctcaaacctgtaatcccagcactttgggaggctgaggtgggcagattactttgaggttaggagttcaagatcagcctggccaacatggtgaaaccctgtctctactaaaaatataaaaattagctgggcatggtggcgtgtgcctgtaatcccagctactcgggagtctgaaacaggagaatcacttgaacctgggaggcagaggttgcagtgagccgagattgtgccagtgcactccagcctgggcaacacagcaagactctgtctcaaaaaaaaaaattatggaaataaaagatataaaactttggcaaatgataggatagaaaagtgccaagtactttgaaggagcacataaaacagaggagctttattttagattagggagtgaggaaagacttgtttgaagaagctctgtttaagtaaaaagatgagtagcgcgtctttagcaaagggtggtgtgtgaatcattcagaaaagaaatattacaaagactctgggcttgaaaaacagaatgaacaaaaaggagggtagtttggagcttagtgaatattgggagtagtggcttgagaggaggctggagaataacatgagccagatgatttaaagtcctgttcaatcacgttaaggatttgtgactttatcctaagtagcatgaaaagcaaagaagtatttgaacaggagaataacatgatctgatttatgttttaacaacatcagtctggctgttatgtgaagacacatatgcaggataaataggaaaatatagtcaccttatttatagctgagttcaaatgtcacctttttctatagcatcccttggctttctcttatcttttttaacactgcttccccatattttgttgttgttatctgtattgaaattaactgtgatatatcacttaatgttttatagccatgtgaatgtgcctgtctctttcaacatacttgtagcttcctaagcataggaattgaatactaattgttgttatatccctgttctcaaatatatgttcaatatgaaggaatttcatccctctaattttctacttgctattctaccaaaaaaatagtttagttataacataaaatctcttttacatctatctttggattcagtggtggggtcggttctaacatactttagcatttgaattaataatattgatctttatttctgtgttgaggaaaagctatgagagatcctttaacatgcatatttccagattcagtgttgttaaataatgctcaatgtatatagtttttctttgtttattttagctttttggatatttcctattgcttaaactacgtaagccatacagcctaaatttcagtgaacagggtttaatagccccttgagtttaataggtgtgtgtgtgtgtatgtgtgtgtgtgtgtgtgtgtgtgtgtgagatctcagtttttattattcattttcaaataatcattactattgtttagttttctggtaagatgttgggagcacacctatgtattgacggtaactatgttgatacttccattggaatgtcttattttcatcctaacaactgtaaggaagacattattttttctattttacgggtaaaaaatgtgagattcatagagatcaaatgtcttgccctgtattacacagctaagtaatagagacaggagcaggatttgagtctaggttgatctgacctaaagcttgtagtcatttcaatgactaattactgattattgtattgattataaaaactagccattagaataatgaaatgcaaagaactgtgtaattaagaagaagactgaagacttgcaaatctggagctttaaaaagtattcttaggtttcctaaatccaaggcccaaactgaactgactttggaactgccacccactgaaggcatgaaagaacttgtctgaacctaaaaggttcacctgacttccaaaacaaaaataaacaaacatcctaaagaggaagttaacatgatccagtgtactacaaggtaatattataaatgtccaggatacaatccaaaactactcaatatacaaaggaaaatctcaccgtttctcaaggacagacagttaacagatgccaatcccaagatgactaaaatgttgaaactatcaaagacttaaaagcacctttattatcatcttccatgaagtaaaggtaaatactttttaaatgaatagactgatagatctcagctaggaaataaaaagtatataaaaaaacaaaaaatgaaaaatccatcacctgaaatgaaatattcactggataacctcaatagtagaatgaagatgacagaggaaagagtaaatgattttgaagatagatgaacaaaattttataattgaagaaaagagagaaatcagattgagggaaaaattaacagagcttcaggcacctctgggataatatcacacaaaacgtctaagtttgaacactgaatcatcagaagaagaggagaaagaaattggtacagaaacattatttacagaaaaaatggttgaaaatgtatcaaattaggtggaagatgtcaagttagagactcaagaagctcagagatgacaaacagtataaatacaattatccaattaaggctaaatctagacacatcataattaatcttctgaaaaccaaggtaaagaaaaaatcttgaaagaaaatacaggaaaacacaatatgttacatataataggcaacaattcaaaagataacttttttatcatagttaaatggaggccagaaaaataattggcaacccagaattcagcattcagcaaaaatattctctagaaatgaaggcaaaattaaaacattctcaatgaagtattaagagaagtcttcactaatcaaaatgttatcaaagaaattccagacgacctctttcagatagaaggggaacaaaaacatagaacttgggactttaagaatgcagaagcgttctttgttttgttttgtttttcccacaacagtgcaaaggcaatgtagtggagaaatgataatcttttcagcaaatagtgcaggaacaattgaacatccatgtgcaaaaatcggaacttgacctgcactgcggaccatatacaaaacttaactccaaattgaccatagacttaaatacaaaatgtaacaccataaaacttctaggagaaaacataggagaaaaatcttggtgaccttgcttgttttgggcaaagagttattaaatacagtaccaaaagtctgatccataaaagaaaaaataattaaaaacattttttctgtgaaagactgttgagagaatgccacattccttcagactgggaaaaccatagactgggaaaaaatacttttaaaacttaacaatgagaaacaaatattgtaattaagaaaagcaacctaaatattttaacagatgcttcgttactgtaggcaaacagatcagtggttttcaagggttaacacctgagggaggatttaactagaaagtagccacatgagagagcttttcaggatgatggagctgtcctatatttttactggggtagtggttttatgactgtatgcatttgtcaagatttatacaattgtaagtcagaatgtgaattttactatatgtaaattttaaaatgttttaaaactttaaaaaaatacatggcctgggaaaggttttataggtgattattcagttgtcaacactagtatttgtcacagtctgcattatatatttattgtaaagatttccatcaaatattatttaattgttgttataaagataaataagttacagctcagattatctgttatttctgtgcaaacactattatgttggtcatagagtctcaagaccataaattggattagctttctctatagctatacctataaataggttaatttttactagatgtatttatatatgtgtgtgtatgtgtatatgtgtgttttatataatcctaaattaaatttaccattctctaataaagattatgaattattaagatgagaaaataaacttttcccagcaatttttatataatataaaatgtccaggttttacctagaaatgtgctctacactcaatgaattatagttgttacaagtatattgacagttattgagttagactaaacagtctaccaattgtgatctcagtaacaccgtgagatctaagatgactcacccatgcccaccaaacaaacatgcttaggaaataaatatatttacatcatagattatatttttaatggctataaagcctcacagaaggctatgttatagttttatgagagctatgtaaatgtacataacaggttcaaatgagaacatgtgttctttgatttcagtttgatattctacacttccaaaacaagagttcttaaactcactgtttcaataatttaaagtcaaaataataatttaaataaattagaatgaggattataagcacaaaataataacttaaagtgacataaggtaagcactaaaacaaagtaagcaatgactaggtggaactgtaaagtaaaaattatatgctttttcagcaaattctgggtttagaatattctcatgcagtctattcactttcacttcctggtcccactcctgtttcccttatcttcagaccttcaccgttgccatttatggtggatgtgcactgcaaccaccatactaaggcgtttatttaaatccagtttaatttgctcctagcccctccatggggctggttggtagaaaatgtaataccagttatttatagagccccaaacacatacacactccaggattaggtagaaattttaataattttactggtgtaaagccctgggattcttatttcactctggaatctaggagcgtgtttgatttcttcttaaaggtaggtctgtttctggccaaaatgctacattagtttctatactaaggcaaggagctgtggtacctagggcatggctatatggattcctgccatttcattaaaagtaaatgtaccctatcacttttatgacccctttcttatattaccttcctagccttggaattaactacttgaaccctgattacttcaatttcctcaccccaaagagccttcctgtccatcctcttcttctaggttagttcatctgctaacagttcttatatcttttgagaagataagggaattctcaggtctcctgaattcaagatcctgcttgttctgaaagggttggcataggatgaagtggaaattttgcttatttctctgatccatttggattccctggcttccctttctagaaccatcctaaaacatctatccgattcgaaggtactatataaccatggaacaattttttcttctcccttggatgtttgaacctctgacagttaactcatcatgttctagctaaatgattaattctaactgttctaatgaacagaaaacataaatctcactttaggtggaatcattgtgacttactgattgaataaataggaaagaatcaggaatgttgctgtcatccttcattgggtgaatggtggtgccactcttggaactgacaaatgcagaaggaactggtatacaaaggaatatgattatgttgagtttgccttgcctgtggcatgttctagtggaaatgtctaccaggaagttgaaaatagaaatagctccatgtgacatgaggtcactacttgtgcatgtgataaccttctcaaacatatccaaaacatatttctcttatggccaacaaatttcatctctcccattttcccagtgaagggcatctaggaaacatccttgatttacttctttccttcagccctttctctgcctatacaacccatatacacaaatagtctatcagcaagtccaacaacacatgtagagtatatgctttcttcttccaagcactgaaaatagtttgaagatgggttcttccagggctgtgtcttgctgggtgggttcaccaaggcaaaagaacaaggtaaatattgagacacaagtaaggaagtggttaaaataatagagtgtacttaatctgagatagttaaagaaggtaagtaaagaaagaaggggattgatgagcagaaaattaagaagttaaggaaacaagcatcagtgttttaaaaggatgggacattgtaggatgtttgaatttaagattcagaaatacagcaattaatacaagattgacaactccaaaatgttgtcatgaaagtgattaagggggattgaagatcatggtaatcaggagattatgaaactaaaaggatggaatcttttgttgatttacccaagataaatccaggaaaggaagattgtcagcatcttctaaaagtcttcagtagataagtgaaatggcctgtgaggctgacagataatcccaaatgaggagaggtataagatggtattgcctgatttaacaggagccttaaaagaatcccatctcaaagttcatcttccttaaaacaaaatataatgcaggtgcaaagggagaggagttgaaaatacattacggaataacagagctttaaaagccagtcaaaattctttgaccctgatagaactctaatacaggtcacattggtaagagtaactatttaaaagcacttagtgatgtagatcaataatgattggatgggtcagcaccaaaaatgtctgttatttgacatgaaggaaattaggcagaaacctctatgagccagttcattgccgtcatcatttctgatgcattttttctaaaatatgtagatttttacaaattaagataattagtaagtcagaagtacgatactttgtaaaatgcctaatacatagattagaattacatgaaacaacaaataatgataatgaagaaaatcagcatgtaaatgtaaaataactctcacaaatattaaactactttttcagcaacagaaaagtcattagttttaaaataaaaattagtttttggattccctacattaatgaaactgctccttggcttacaaatggcatgacatttaaaatttttgacccattcgcaacaaacatctgtagttaaagtgaggctatcacagtctcttagtctataacttagctgcttattaaaatatacatctaccaaaccaaaaaatgtttttcaaaaagtaacatctggaatcttgtcagattctaaggcatttttgttgaaatcattgaagatggaacattattaggctagtgagataaatttcttgacacttgctgcgatttttgttttagaagcttgctttttggtttagatatttttatttatatatcatcacattttctaaaacaaaatgttctactcaaaaaatgtttggaaaattatgtaaatatatgttaaaaaggtttagaaatttgaattctgaccgcctttttctctgtaaatatcctttttttataacaacatatatttttgtttttcataagtgaagagtaaattggtttacagtgatattgttctatattatatgcacactcaaattgtatgcattagattgtggagcattttctgatatttgtgctcacaagtaggttagtgtcatttgtcagtaataaggcttgcctgtgtagttggaaagtgccattgccctagagtgctgtattttgaagtcatctgtcatggatacattgtagagagagaagactatttatgtttatggcattttaagtaactgagttaaaaaccctttggaatatagagaagtggcttgtttactgtcatcactgttcacttaatcctacgaccttgacatgatagcattcccataaatctccctgtgggtagatcaataaaacagatgaacatcaaaatgtaatgattgtttcagctttaggaattaactatgtaatggaataaatataagccagtaagcagtattacagaaacattctattataccaacccctttttctaacagataacacttactagaacataaggagttattatatattatattttctgataatgtttgcagtatctaacagattattatatattaaaaaaagaaaatagatacaagtaatatgcatattatgactggatttttaaatagcagtttaaaatttttggtatacctatgattataaaaataatgaagttagggttttttttgcaatgatgttttaatatagctttattttacattgtgtttttattgtattatatctccattgttaattttctctagttcattcattttaattttataattataattcctcaaacataaatttttaactacagtacgttcctctttcccccaatgtaagcagctactcaggtattcaggaaaaaaaaaactgaggaaattggaaaactgaaaaaataattaacacatcacactaggaaaaattaatggatgaaacttaagggaattaacactcagtcctcactatactatattccagagtccatgtccacacacaataggaaaataaaacttagattcaacagcctctgaaaaagtaaatactatgagtactcccattgcttacataatagatctgtaagataaaattattttaaagcaagttacatttgcctcttaccaattttcatatgtaacaaaaaaatggcaatttagtttggtgtagtaagaatctctattctttttgaacgatattttgtactttgcatgataatgatacattctaaatactaaaagtatgctatataatgtgaaatctgtgaaaaatcatagaatttatgctttatataaagattattatagaattattattatagaattatgtctaacataactgtaaagaccgttataagcatttttagtagctacttaggtagaaacctaacaaaatgagggttttgaagcctgtcagtaaagaaaaacaatattactatgatgtataagtccgcagaaaaaaagatggtagaagtatctttactaatttaatcttagaccattaacatcttccatgaagataaggtggatatgtgtcagtaaataaatggtcaactattttactttatgtttagacaattgagccccaggaatattttcttctattttaacaggctttcaagttgatataagtcctaaaaatttgattcgtaatttttctagaagttacaaattgtaatatctccttgtgcatactgttagaagctgttgttgttgttttttttttttccaactggtgttcttttctattaccattattcagtaagtagttaccaaattgtagtcaaacactctattgataaagataccattcagagctagggaatagagtattacacaaatagaatttttatgcctgttttgagtcttaacataagtctaaaaaattaaatacatctggcttttggatgaagaaagacttttgaagtctaggcagtaaaatatgccaaatataaactatcacactggcatttttacaggttgtaaactagacttatccaactgaataagctaagtgttcttatgacactttaatacacattactaagcagtaagttaacatgcatacgaagtggacaactaacaaaataccttgttaactgatttaggatcagtaattaagtccgcaataactgatggattgttaaaattttcacctttcattaaatttgatgtgttatgggcagagttatgtgaatatcggttccaagtattaatgcttccaggggcacttaagcgaagaggattttgtaattattttcttgaaaagaatcctatctgttgatacctactttagtttaaagtaaaatatataaatcaattactactatgtaattcgttatcttatataggtcctttcaatctatattaataataaagctttcttcccaggtaaattccagctatttctaatttactatcactcacattattttacattaaacttcaactgtggtcaacccaaatttgatcaataaaatagtaatcatcttataaagaaacctaaatatactcctgtctcagcctttttgtgactggtctgtgctattctgattttggtgtataatacaggacataaaggaataaaatacctgtcagatttgtcacttttcattgtttgaatttcttctctatctctattctgtcccacttgagatcatgccaataaaatattttttattttgaaattgcaatctcatccatcttcacacaatcaaaaattatttgtttttatttcatttattataaatatctttactattattgatactactattgttcgtttgttacttcttgaaacaatctatactccagatattttaagtggctgtctgaacgatttttaacatttaacaagactattatttttaatacacagtacctgccacttaggcttgaagattaaaaacatgcaaatgtaagtaggtgttagttattattatgtcattccttgttacgtatttaccaaatgaggcaatttgttaatgatataaaaatattaaaatatctaaattatacctaaaatctaatatatattaactcagttcagtatatttttttctttcagatgctaaggttagaaagtgtggctaacaagaatcctctattctagcctctgaccaattaacaaatacaaccaaaccatctaaggcacacatcagtgctccgaagtgtttgcctgcattttcttgtagtcattttatagctttgggttttaacatttaggcctttaatacatctttagttcctttttttatatagtgagagataggagtccggtttcatgctgcagatggatattctgttgtgccagcaccattttttttttttttttttgaagagagtgtgtgtttgtgacactgtttttgaaaatcagttggctgtaagtacatggatttgtttctgggtttcctattctgttccattggtctatgcatctgtttttataccaataccatgctcttttgaagttaggtagtgtgatgcctgcagctttgtcctttttctgtaggatttgcttaatctattcaagctcttttagggttccatatgaattttaggactttttgtctattgctgtgaaaaatgacattggtgttttgatagggattgctttgaatctgtagattgctttgaataatatgatgatattaacaatgttaattttttcaatcagtgagcattggatgtctttccctctggttatattttattcagttttgttcatcaatgttttgtagttttccttatagaggttgttcacctctttggttacattgtgaataggattaccttcttgagtttttactcagctagttcatcattcctgtatataaacactactgattttttatgttgattttatagcctgcaactttactgaatttatcagatcgaagaggtttttggtggagtctttaggtttttctagatataagattatgtcatctgtaaagaaggatggtttgatttcttcttttcgaatttggatgcccattactttttctcttgcctgattgctctgttcaggacttccagtactgtgttgagtagaagtgatgaaaatagtcatccttgtcttgttgagacttattttgtgtcataacatatagtcagtcttggagaatgttccatgtactgatcaagaagaatgcatattccatagctattggatgaaatattctataaatgtctgttagacccatttggtctaaaatacagtttaaattcaattttttgttgttgttgttaattttctgtctagatgatctaacactgatgtagggtgttgaaattcctaactgttactcaactggagtctatcgctccctttagatagaataatttaataatagttgctttatatatctaggtgctcctgtgctgagtgcatatatgtttagaattgttattttctcttgctgagttggtccctttatcataatgaccttctttgtcttttgtttttattgcttttgacttaaagtctgttttatctgatataagtatggctactcctgcttatttttggttttcctttacatggaatattgtttcccattcctttatttttagtctgtatgtgtctttgcagatgagatgagattcctgtaagcagcatatagttgagtcatgtttttaaaccattcagccaatatatatattttaagtggaatgtgtaatctgtttacattcaaggttgttattgatacatgaggacttatttctgtcattatattaatgtacttttggttgttttgtatatcctttgttcctttctctcttttattgtttatcattgtggtttggtggtattctatagtggtaacatttgagttctttctctttcttatttgtgtgtttagtctaccagtggattttatactttcaggtattttcatgattggagatagcattcttttgcttccaagtataggactcccttaagtatttcttgtgaagctggtctagaggtgatgaatttcctcagcttttgcttgtctgggaaagactttatttctcctccatttataaagaataactttgctgggtaaagtgtcctcagttggcagttttttttttctttgaatatgacatctcattctccactagcctataatgttcatgctgagaaatcccttactagtctgattggggtttccatataagtagttagatgtttttcttttgctgttttttgaattctttctttgtctttaacttttgacaattggactttaatgtgccttggagaagaccttttgaaattgtatctctttagggatctctgagcttcctgtatcaggatgtctaaatcacttactagacttgggaaatatccagctattattttcttaaataggttttctgtctcttttgttttcctgtcatcttcagtgacactaaaaattcaaatatttagtagctttgtgatgtgtgttgtgttatgaggactttgtttattatattcttttttctttattattttcttactgggttatttcaaaatatctttcttcaggttctgaaattctttcttctgcttgagctggtctattgttgaagctttctaatgtattttttatttcattccatgaattcttcagtttcaggattcctgtttgtttgtttgttatgatacctctttagtaaatttctcattcatattctgaattggttttgtgatttatttgtattatctgaattctctcatatcttactgagtttcttgaatatcattttgaattctttctctaggatttcataaatttctttttctttggaatttcctgctagaccataattttgtttctttggagatgtcgtatttgcttgctttcttcatggttcctatatccttatgttgatatctgcacatctggtataattgatgctacttctaattttttgaatttgcttttgcagtggaggatacttttatgaagatatgtctgtggtgtttgttgggtagggcactttggcctgattctgggtgcatgcagtagtgtactctctatataatttcttaagctttaaacagcatcagttgtatccatgatttcctcagcagcttagggtgtagttgtttgtggaggctgtagtaaagttttgttggagatagagatgccaggtgggccagtcctttgggctctgtggtggcaatggtgggccaagtctgcctgtctttggacccctatctggcataggctagtaccagttgtagcaagtccaggcataccaatttttgagtttccaggtggctttcttgggtgccagcagtggcagcagagggccaggtgggtagatgggcagattggctggtctttggttccctgggcagtgggcgtggtatgagtgatggtaataataatggcaggacaaccctccggctcccaagttgtctatgctagcattggcggtggctgtgacaggctgggtaggcctgtcccaggcctgcagatggtatattggaatgggtgctagctgtggtggtagtggcaaattgggtgggcccatccttaggcccccatgggaagtactcaggtggcaacagtggtggacagggcagagtgatctccaggcctccagagagtgtccttgggcactggggagggcagatccaggccagcaggacctgtcctcaagtatcctggtgatacatgcatatgctggctgaggtagacagggaggggtttttccgcagccccccagtgaattgcttggatagggatagcaacaactgcactgtggcctttctgctggggagggagtggttgctttcaatgtgcagcacccataagcagggagctggggagtgtgcacttcagcccaggtagcagcttcgtgtggtggtgtctatccttagcacacataaaaatgtgcagtggcaccatttctgggggcagtggggatgctaccagtggcttgtgcttcaactctgttggcagcagccaacagcatggcagctgtgggtgagggatgtcagtggaagcccaaggatgtagagatgcaggggctgttgggccacagggcaggatgtagtctaatggagactgggctctcaaaatggtgccttgatgtagctgcttaggcctcaggggtatgtgggatcagtttgagctccttttctctggcagtgtaatcacattgtttctaggcagcttcttgttttattatcagagcctccaagggccaagggactcgcctgaatctaggactgcaggagtccatggtgggaatgtgagccactgggggtctctcacccttttcccatactgggaagcctttccaggctcccagctgatctcagctgagtgggctgcctcacatccctctccttccttgccttaggtgtttcctgtcacctctctattgaattccagtgttctctcttagatgatctgttggaagtgtgattatctacctgctattttggttcttctttgtggagggggcaagtaccagatgcctctagtcagccatgttaaagccccacataacacatattttaatgttatatgtgttatatactgtattcttacaagaaagtaagttacagaaaatgtaatgttattaaggaagtaatggccaggcacggtggcttacacctgtaatcccagcactttgggagatcgaggcaggcaattgcttgagtccaggagtttgagaccagcctgggtgacaggacaaaaccccatctctataaaaaatacaaaaattagccgggcatggtggtgcatgcctgtagtcccagctattcaggaggctgaggtgggaggatcacttgagcccaggaggaagaggttgcagtgagatgtgatggcgccactgcactccagcctgggtgacagagggagacactgtctcaaaaataataataataataataataacaaaaacctaagaaagagaaaatatatttattacaaattaagtggaagtggatcatcataaaggtcttaatttgtatcatcttcatgttgagtaggctgaggaggaggaagaagcaaaggggttggtcttgctgtctcaggggtcttttttgcagaggtggaagaaaacccatgtataagtgaatatgaacagttcaaacccatgttattccagagttaactctacttgaatatcttagttattgtagcctccttcatcagtgatctgagctagatcttctgaataacttgctgcagcttctacgtcagcacttgtttgttttacctttatggtatggaagcagcctttgacatgccttcctcactaaacttaatcatttctagcttttgactttaaatgaaagacaccactttttttcactggaacagttagatgccattagttggggttattaattggcctgatttcagtattttttgcctcaggtaatggggaggcccaagaagaaggagaaacaaggcgaacagctggttctggagcaatcagaacacacattcattggttgagttcacagttagatatgggcaacattcatggcaccccaaaacaattacagtagtagcatcaaagatcactaatcacagattaccataacagatattttagaaagttttaaatattggaagaattacgaaaatgtgacccagagacattaaatgagcacgtggcaccaagagagttgcttgatacagggttgtcacagactttaaatttggaaaaatacagttatctgtgaagtataataaagctaagtgcagtagaacaaggtgtgttgtacctcataggtttgtggagcatatgttagaaaacaaaatcctgcagttttatgaaatttgtattaaataaatggatatttcaaattggtaataaatttaaaaggaaacctaaataataacatcaacacttactgtcttatttttctagtttaaatatatacagtattatatttaatcatcagaatagtcaccagcatatttcaaactaataaaatttacacaagtttaaaagtatctttactgttctgatttttaaccatttacttacggttttcctttatttttctcactgttataacagtgagaaatttatcaatgcattgtacttttacaaatacacaggaatgcatgctagactatttactagaaataactttcctaaataaaactgtgtcagagcattgttcatttgtaaatgttttccaagagaaacaataccaacttcaataccataaggcagaaattcacctttggctttaaaattcactggcagtatttttttatttattaaaattagaatgtgcataagactgcttttcatctctcagtatttaattataattagtcactttcgcactgctttccttcctttcaaagcagtacacacacaacttttgaacgcttctactagttttcgtgtttatttgctcaattaaaatcaagatttaaaattcatggtagacattcatttcttttggtatttaagtgaagcctaaaacatctattttattcaagaacttttagccacgccgtctcaacgtaaggtcatctcatacatcatattcgtgtgctccattttcaacaactttttgatacattggtaaaatgaaatttaagaaggtaacaatgtttttctgatttcaaaagggggaaatcttagaaaatctcctacttattcaaaaaataatattatatcaatcctcaatttttgactctggtttttccccttccaccttaactgaattatgattaaacatacatatttacagattttattctttacttccactacataaaagacttgcaactattttttatgtaatacagagaaagggacatgcatgattatgtcatagttttgcaaaaatccagcaaggtgacaagttaacttgtgtttctagaaaccatacatgaaatcatagcatttgtgatgctgaaatttattgtaaatgacagacatttgtctttgcagcagaacaacaagtgatcttaaatataatgagtcagaaatattagggaatttattaaaacattagacgtaatttctcagttactttctaaaattcatagttacctgaattaatatgactgttatttacagttaatagataaattgtttctacctaaatatttgaaatgtaatgcctttgtgttaaatattttctcctcagaagtatttatgaggggaaattgtctaggatacagttgtcagggactaattggataccctataaaacaaaagacttcattttatatatttattattattattctttacttttgcttttggtcaagaaggcaattggaaaagaacaaggacctgttatttccatgatctaaaggtttttactgcaacaactgagcagctcacttttattcaatgctacattaacttttccattacgggtgctgttgtcaagtacagagcctttgcacattatgaagttgctgtctggtatttgttcattgatatgatttccttatttgaatgtttcaagtaattctggagtgaaagccttcatcactttttaagattgttgtctctttcattttaaatttagttaaatttaattgcactgctatagtttaagggtctgtaaatgttttcataagcctgaattctctcattttttcttacttagaactactgtcacttaaactaaaatataattatagtgttactattattcataaaatctagtgttcagtgacaactcttatttcagcaagaaagagaaatactttggtgtcatgatgcccctttattcatttttcttcttttgcttcttttcattcgttctataaattattccagttgtctacaattgctcaagagccaaggaatattctctaggaggccggagtcttagggtgaaactgataggaggaggaataggattcccccattctggattagactgtgaggtgattagtctagaatggaggaggtggttagactgttgaaggagaaggagatttagagtagtagagtgtttaggaaaaggggttttgaagttgtgggcacatgctgtaatacagggaggctgcagaaaagtttctgtaagcctgcctccggttgaccatgtggtaccccactgagcagactggtgaacttacctattgagaggccctgtcccacattcctagcaaattttcagacctccttccatactggtaaaaggataaattctgtggtgatgaaaagcctattatagttacataccctttgttttcatgattccttgaagagctaagacatagagaaatagatcattaaaatgaagtttgtgttctgcaatattttatttgatgataggttggttagttttaaaattttgaccaaaataaaaaaagtgaagagaagaaacagatgtctccaccaactgtgggagtaagctacagtggtggcagtgtgattgatgttcatcaaaaacagtattaatctaataaacagcaaggagcagcagcagcaatggtgaaacacagggctgggaaggaagctaatttgaacactgtctagggattgcaaagggagatgtggcagaatacagttccctgccaatgaaggactacatagtcaatttaggttgaactgttgaggctggccatgagaaggaactatcctttggagattagggtctgatgggatatccctttcttgtatagcaataatcttgattcactgtagtttgatagttaatgtctcccaaatacttaatgcttccaaacttttactgctgaaacatgtcattgtcttaaagcagcaaggtgctatctcttattccataaccttgttaagtttacctgttccattgaataagcctctagctcagatctcagtgattggtacctatctatccctgatatttagccttccagttccctctaattttaaattgctttctcagcccactgttttaccataccttaacatcttggaagcatttgactcttgccttccagtaacttcaccataaattatgatactttctaccagtgtagtcctatctttgtgacccctgttatccctgtctctcatttctccaatcaaaacaaatagaccataaacatatacacaggtacataagcttactccctgcctgaaacaaaaacactgatttgtgtcttttcattgaagtttcttatttattattttgatctttatgagctcttcagtaattactttaagacagcagctcaaaatagagccctgtcttagtatttttacaaataaattatagttattctgattacaatatagctttaggaatggaagaacaaaataaaatgttatcatcaaatattactgtcttggggagaaacaggaatacttacgtgtatgtatgtgtttgtgtgtatccaggaataggcccatagaaataaagtctgtttttgcttcattcttcctcacatttcaaatatctttgcttctagaaatctctttggcccagctggctggcctggcctctgaagacaaacaccctgtctgtgcctcacaaaaataagtctattttgctagtagattctaagagacagagaaaaattcataactcaggaatgaacacctgtggtcaaatttcagaaaataaaataggtcattcaaaacatattttggttttgtcctggtatctttaaggtatatcatgacattggctggccacttagccactgcttataaagttagccttatactttatttttatttgttggtaaagaatccaagttagagccttttaggtcttgggtaagtgttattttacaagtaaatcaagttgatggatttgaatttcaaatacacgttgaaatggactatagatcaccacaggatatttaaaaaggcaaagaggcatgactgatttttttcctttatattaaagtatacatacatacagaagagtacatatgtcataattgaacagctccatgaattttcaaaaactgaaggcacctatgcacttaccacactagatgaagacacagacaattaccaacaccctatatgagcccttcttgtattcctcaccctgctaaggtaactgctatcctaaattctaagagcatttatttattttgtttacccttacatttataaatgtagatggaatcatatagtataaacgtttttgtctagtatcttttgcccaatattacatttgtgacattcattgatattatttcatacagtttattctcattgctatatagtagtccattgtgttaatgtaactgaatatatttattgtacagattttaactattatgaataatgttgctctgaacattctggtacatatttgtttttttttttatgaatagagttctgttgagcatatacctaggattggaattgctgagtcatagtgtagacttgtgtttaactttactgctgaacagttttccaaagtattcagttgctctgcattctctcctatactttacattttctgtgattttcattttagctatttaggtgggagtatgatgtattgccttatagtgttagtgcattttcctgaggttgagtgcctttcatcatggccaaaaaaggtcacttccctatcttcttttgtcaaatgtttatataagcctttggtccattgttctattggattgtctttttattcttactgatttgtaagaattcagtatatattttggatctgaggcatttgtttgatatatatattgcaaatatcctactctgggttgccttttgctttcttatttttagttcttctaatctatcattttatcttttatgattagtgatttctgttttttgtttaaagcatctttgcctagtgtggcatcacaaagatgttctcttaggttttcttccaaaagctttcttgctttgatttttactttcagatttgaaaaccatttggaattgtatatggcatgaggcagaagtcaggattactttttttttttttgcatggatattcagtcaaagtgttatttattgaaaagaccatactttttcttactgtagttaagatgtttgtttctggactctctctacagttcttttggtcagtttgtctatttttagaccaatctcacactgtcttaattaccatatctctataaatagatctttatacctggtagtgtaagccctttagctttgtggttctcacaaattgacttggctattcttggcctttgcattttcatattaattttttgaatcagcatgccaatttctgcaaataagtgttaggattttgattgggattgcattgaaggtagagaacaagttggagggaagtgacacctttgcacttttgatatgcaaatggcatcatttattgatatatgcctttctgtataggtcatctgtgatttctcttggtaatactttgtagttttggccgggcacggtggctcacacctgtaatcccagcactttggaaggctgaggcaggtgaatcacctgaggtcaggagctcaagaccagcctcgccaacatggtgaaaccctatccctactacaaatacaaaaattagcctggtgtgatggtgggcatctgtgatcccagctactctggaggctgagacaggagaatcacttgaacttgggaggccgaggctgcagtgagccaagatcacgccactgcactccagcctgggcaagacagagtgagactcttgtctcaaaaaatataataataataataataatttgtagttttcagtgtggaggtgttacagatatttcatcagatttatttgtaggtgttagatattttttgaagctgctgtaaaaaatatcatttttaaaatttgactatgaacttgagactgataaagaatttgttttcctgcatatacttttatctaataaccttgccaaatttgcttactagttataatagtttgtacattttatttgattttatatattttattagattatgagcacagtcatttgcaaatgctgtcagttttctttttcagtttgtgtagctttgatttgtttttctactttctgtaatgactgcggtctccagtacactgcagtatgataatgagaatccttgtcttgcttctaatgacagagaaagttttaaatattttgccacaattgtgatattagtcataggttgtttgtttcgttttgcttttttatagatactttttaccaaattaatgaaatttccttcctgtcctatttgttaaaagtttttatcctaaattggtatagaattttttaatatgctttttctttatcataattgccatatgatttttctttttttctacgaatggtagtgattgaattgaatgtggttataatattaagctatcaaaaggtaattattaaactctataatgacttttcagactgtaaacttcttgacagtttaagtacctaccctctggcaatgtttttggtacctaagtagtagtttttgttagctaactggtagttcaattaatatgtcatttgggggaatatatactttctttcatccaaattagtgccattaaacaactattctgtaatatgtcacagcagactactatgctgtacactttgtaaaatggaaagatatataagaatcagtcccagcctcaatgagctatagtctcatttgtgagagcataccaattcttaggtaattataatattaatacaaagcaatatttagtaatatttgagtgaggcattaactaacctgtatgctttataaagacatacatgaatatccagacttctattcccgagtagcatgggatgaaaccgccaggcttctttgagaaacattaagttatttaaaataaagtatgagagcaatagtagttgaagataagactgcaactctactgcaaagtagagtccaaattcaatcaaggaggatcttgaatgcccagctaaagattagacctggttctacctggttctgtaagcaactcaattttacaaataaggaaatatatcttgagaggtcctgacctgcctttggtgataataaatcagaactgggagttcataataaaaagaaggtaatcaccttaatccttaatgaaattcttcaccttcaccaaaccagtttatgtgactgattattataccggtgttgctttatactcataaaaataatttgtttattgtccatttttaattatcttcttctatttctaattatatttcttagttgtaaaactaaattgatgaagaatggaaaacaacaattattctctagccatgacagatataataggcattcatgtcatatgatactaaatgttataatgaggtcacagggcactggagaaaaggaaacaagccatatagtacctctgagtgatgaatgtgaggggaaacatcttatatagggcactagccaggatatttatcatttagtactgaaaacctgatgacatgataacaaggattttctatggtagtcatgatagcagaatcccatagactctcttcatgatgtctttatccctttagcccagcacttgcttaaacaagaggcaaatggccacagatttcatttgaaatgataaaaatacctttatcatttcctttttggctgttgttttagttatcttaatattcagaacaaataatgtaattctattttatttaacatatacttaagcaccagaaggctagcctttgtagttggaaggaaggtaaaaggagaaacacaagccatatagatgagaaactcattaacagttttgttgttttggggagtatactgcatttggagtagtaaatgctgtcttttagaaaacattaattgcacataacaattatcaataaataattgtgaaatgaattaatgcaaaaagggagtgaattgttatcatttctacataagcctatatgcacagtgttaatctcttctcattcacttgttttttaaatcacaactttttaataggtttacattttccaaaaagtgtatttatattattcactttaatagtaaaaatgcctgtattttgcaacatgataaaaaatttcataagctaatttgaactaaaagtggttaatttggtagcaagggaaactttagttcatcttaagcccctagtttagacttttatgggctgtatttcaaattcaaacttttgctacaaacaaaggaagagtaatcattctggtgtgaacagtgccactgaaggacataattctctcataccatctgtctttatataacctttagaccagcaggcactaattgataatacagttgcttttccctctgtccttaaatgcattaatactggccagatacacatctcactatacactgattatacataccagtaccttatagatttgaggaaatttgaattgtaagagaattcatggaagagaaatttagacataggctttagtggaggtaaatcatcaaaactgcccatctagaaagactccgaatttggtaagttaggtgacctcaaactgagggaggttagatgacttggtagaatttttaagagcattcagaattgagaatagaaggacgtatattatctaaagtcagaaaataaaataatatcagccaggaccaagatatgcctaatcaatatattaactgtcaatagcattatttaagggggagagtgaacagatggaatagggattgttcatgtaacatagttcagtctaattcagagagctatagggttttgcatacccaggggaatgattgtcaatgtgtagctggaaataatgcttttaagtgaacttttagatcaactcaaggcagagataatccaaaatacagcttttagattgagaagaaaagcaatgagagaccattgtgggtgagagggtcaggcatagccaagcgatgtgactggtcctcgtgcaggcatcctcctagcccagagacaacagtcactacacaggatctattggacgtagctgtactgctgagaaagacatggaaggatatagtatataatacagaagttaggaaaatgaacaataactaaaattattcatgaaatttgacctcgatgacaggaataatgttggtaaaatttttatcagtatttttaaagacaaggaaaagaatttcaggaaaaaatacaaatttgtgtgtatgagcatgtttaaacatatttttatgtttaaggtaaatgtatagtttcttctatgtttggcatagtgatgaaaaagccaagcagataggtattggcatatgactggctggccaaaagagagtcaatctggaaagatgaatccagtatagaggcacaagtgatttctagaactaattgaaagaaaaattgaaaaggaaagagattctaataccaaggcccagtcacacccatactgagtgaggtagcatgcggaagtcactaagacaccaaggaaaaggttagaaaactggaagaaaaacatgaacaacatgaatattaattttcagatgctaatattatatcagtgttctgttactgaatcagttgtaatgttctaaagagtatttacttatcctaagcttttatacctaaatggattctctctacctttagtaaaaattgctaaccagtaaattacatctctgagacattaagtagaacctttgaagtatgtgagagtaatacatctccaaaagtacgttatatgtaatcagaggagtgattatttcttcagtggattaaagccttctcttgtcaaagctgtcttacttaggcttttctacaaagcagtttttaaaatgcatcccatcagcatctagaaccttgaataatcttttttttttttttttttttttgagagggagtctcgctctgtcatccaggctggagtgcagtggtgcgatcttggctcactgcaacctccgcctcccaggttcaggcgattcttgtgcttctgcctcctgagtagctagaattacaagcacctgccatcatgccgggctaatttttctatttgttgtagagacggggtttcaccatgttggccaagctggtcttgaactcctgacctctggtgatccacccacctcggcctcccaaagtggtaggattataggcgtgagccaccgcgcccggcctgttttttaattacttattttcaatcatcttcattttgcaagtggactactttttctggaaagattatgatattgcaccattcccattgttaattacaagttcagctgaggatcaccaaacaggattcagtctgaaaatattatctactttttgatgttacctttctctttcgaaagtatactcctgctactgttggctcagatgtcctgtgttttaaacactgcatttatagtattacattttttccttctactggtgatagttttattcttcaagtaaatcttttttagtctctgctgcattaaaattttaataagttctaaaatagttcagcttttttagacttcagtaagttaaggttggcttgagtttctgtatgtattacttgtagagtactttgttttgattattctatgaggtaaaggttttaaaatttttgttttaaaattacagttttttataattagttttttgccttgcttttttctttttaagcattttgcttccacctggttgaacaatataaatcatacatttctcaatttacaacattaagaaattaatattttattttatttaacatactagttgggccaggaatggtggcacatgcctgtaattccaaagctttgggagtgcagagtggacaatcactggaagccagaagttctaaaccagcctgggcaacatagcaaggcccttgtctctgcaaaaaataaaatgaaaattagtcaggtgtggtggtgtgttcctgtagtaccagctacttgggaggctgatgcaggagacttgcctgggcccaggagtacgaggctgcagtgagccatgatcacatcgctgcactccagcctaggtgacaaagaaagatcctgtctctaaaaataataataaaaaaataaaaataaaacatgttaactggaaatgttttgtctttggtatgtgcctaatgcaataaaatctctattgctgttctctgtttcatactgactgaacagggattggctttatataaggctcaccacagtgccatgcacatgtggaaggtggagcttaataaataacatttaccatcactgatttacattgtttccccatcccatccattttcttgtaatgttttatataatttcctagagagattcacagtaaatataatggtatttcaggtaattacattaatgtgccaggttttaattaaaatacacattttctgaatatataatagaaaacctacaatgtttataaatagataaaataaatatgttaaaaataaaatatataatttgaagttgaatgctgtcaatttggaagatttttttaaaggccatgattattccataactgtttattttctctagattcttaatggtactcacaattaaatactaatagtgtggcaacaaatacttacactttgtttgcaaaatatattgatgttctactttaaactctccagtacattatggatgacttgagcaaaattcctattaacagaattttcatccgtacatttgtgaattaagaaacaattaagtgttctctgtccccaaaatatttctactacatagtctgaaattcttgcaaaatgctttattaatgcttaatgccacttttagctgttagttaacaaatggaggtactttgtatgttacataataattcactgactctaaaatttttctctttttaattctaaatatttacaatagctcattataaaataactataggcttatctaatcctgtaagataatgttgacctagttaaaaattgagaacaggcaaaatgaaaaagtaatagttatttcccaaagtattttttaaaattcaatgttttggttaactagatttaacaattagtttgtaaccatgattgaccatcaaggcaaacaaacctgaatttcatttgatcattttattttctaaacctctgtttaaaaatatattgagttttttatggttgttgataaatgtggctgccctaagcttatagcagaagatcaatgttttaaaaattgaaacagtataggtttgtattgattaatgtggctaaatcaaaacgagaggttttgtaacagctttcttagacaggctgctccccagtaatggcaacctatcaattttagctttccactgataaatcagcttgaaaattggatgtcaaaatttttttcactgaagtagtgattttttcatgccctttaaccttttctgatatattagattggtttataagactaagctctatcttatagaaagtagttgtcaaattgacatttggatagatttttaaatgattgtaacaactatttttatccctgtatataaaatacctgtgtgtataatcatatatattctacctccctaactagaaggattgtttatcatgagaaaaattcaatttcgcattacaaaattatagatgtgctgtttatgggtcttggatattcaaagaaggtcagagcctcaactggaaggttaagacacatggttccagaagtattttagttttcattgagtagggacattgattttttttccttgcgaattgattttttttccctttttttctttttatttccttgaaaattactaatggattaattaatggcacctattctatgttgttatatggtcaatagtaacttgatatgctttattaccaaaaacaacgaaaacaaaaaactgacaacactttcttatttatcaggaaccagtattgaggatttgaaataacactagaaaagatttgattaacagcacaggaaaacaggcttaatttggatttaatggggtagacttcagtgacagctgacagtaccataccttcatgcctacatagccgactttaagttagcctgaaaaggtattgattgtgaagttcctgttgtataattactttttgctaggaaaaaaaaatgcatggtgtattgatctagatgggagcatttgagtagcagtttcccttggctaacagtgagtgtcatctttcagccatgataaatggtaacgctctggctcagcataattactttgtggtgaaatgaacctcctatccccttcgccttttccctgcaaggagatatagtaatcatcatcgtctgaaagccatgatttactgaactaatcatcctcttaatagaggaaaatctttccccccagagtgtgtccagtttttgctaactgaaacagaaatgcattatgaaatgatagaatttttttaaatttccgaatccacaaatacacatctttttaatcaactatcaattattcctgacctatgcttctcccctctgtctattccctacctactaggtaacctttgatcttaacatcgaatataaataaaaagagaaaagagagatggccaaatcttatgtactcattttgacgataggtggaataattatgtaaagaaatttattacatttggcaaaaataggaatttatttagttaaaatatgtcttggaaagccttctgggtgtaacactttttcatacaatttttagtgttaagcaacattattattttttagtttctgtgatggttctctacattaagaggcaaataagatgcctttaatgtggaaaccatacattccccccaattctaaaaaactaagataatttatattgtatgctagcttttttgacaaagatatttaatatgttatctattttttattaagcctgtgttatattttgctgaaaatagatctgtatttacttgccagtactttaatatttcccctgggtaatgacttttagttaagtaatgttatttaaagaatatctggcagtcattttagatcattttaagactgctgtgaagggtttggataaaggtcattttcagtgattgtgcttagttaaataaatgtgaaaggtttcacaaagggaatcttgcttttcagtgtgctgtcataaatttcctcttagcacatctgggaataccaagtaaaatgtagttgtttctgccttgaaggcattatattttatattttccttctctttgtttattttctcctcataattctatttattcccacaactgagcacagaggtttcattttgtcataaattagatcctccacttttgacagtttgtggaaacccctacctatatttctctaaacgtttacgaagagtagatttttttgctaagacttcttgaaaagtctggcgggtttctttttttttttttttcttttggtaaacaattcctccctgaatgtaaccctggttcacagtttgctcccactctgaccacagctggcctcttgctgttcacagccgaaaagtgaaatcaattcttggtctaacaaaatgccaaatgcagatgaaagccattctgatcattcatagtcatttcccgtaattgtatcagcctgtggtacttatatgatctctggaaagcattgtttattcaagtaaattcagtcccagcttctttgttgagtgttgctgtcttctaggaaaataatacttccttaaacccataagcattgtgaatactcatcattatgcagttttctaaaataaccgttgctttttccccctaaggaaatattacatgtctaatcaaatcctttattatttaaattctagaaatttgtattctaggcaaagatgtctctctatttcttactgttaacaaaatttaaaattctgaaaccaaaaaaatgctaaaatacctcaatccaaatgatcattgatctagtattttcttaaaattttttaaatgagattagatagaaagctgtattattatagctgaatgcttcaaaggtcacagaacaactgtgagtttgatggaaaacagcttttctccttcctattttaaatggttcctactttgattgcaagcatttattataattatcaagagattagtctgctgtgatagaatccttgtaatggaaccatttaaaaggaatataatggcagtttattggattctgcaaaagaaaggagcacagataaagtggtccttttataaatggctcaactgctagctgagtatactaattttattattctctcttagttccctcactttagtagtttttgtggttaagattacagtttttttctaatatataacctgtcctctggtcatttctatggtttatgtcttttgtagagtgtgtgtgtgtgtgtgtgtgtgtgtgtgtgtgtactcagtactctctgatatatcgtttttgttttagaacatatatttgtataatattttttctaagattattttgaatatttacattttgatttttgaaacttataggcatattagatgagtccattcatcacttctcattcatgtgtacttattctctaggtacaataaagcaatccctcccagtgcagtaaatacccaggaagtgggacttaagacctattccgtgctaataccttttctataaaaattaatgcagttgacactcagggtagatatatttggattctttctaatttctcaaaggcaaaaataagggctttaacactttctttttctttggagactttaatccatttggaaccagacacaagacaatacaaggacaaaatttttgaagaacctaaattcagtaaactagatattcctgttctttcccaaactggaaactagtagaattgcaatgtttgctaaaatacttgaataaacaattagagaatcgatgcctgcagagaaaaggcactaaatgttatctgtcagaggtgtcagggctaggtagaagactcaagttcatccaaacagattcttgtgaagtgggggactggaatggggaaacttaaataatgctaaaataaggctattttagagattatacactttctgaaaacaaaaatcagctagtaagtaccttgcactaataggtatcttgagcataataggtcttcaagaatattttttggaaaattttgtttttattaaagtagtaaaggaaacatcactttttaaatcttaaattttatatttctttgaagaatttcaaattgtattatctccttttttatattttgtgttatcagtgtacatgttgttattttcttaatattgctgctatacaaaaatgcctgattgaagaggagtaatggttttatttcttcatacttacctgaaaattcttaaatcagttgtcctatgccataagaaggccttgcattccaggtgcagtggctcatgcctgtaatcccaacactttgggaggccaagactcgcagatcacttgaggtcaaaagttcaagaccagcctggccaacatggtgaaaccctgtctctactaaaaatataaaaatttgctgggcttgatggcacgcacctgtgatccctgctcctggggatgctgaggcaggagaatcacttgaacccaggaggcagaggttgcagtgagttgagactgtgccactgcattccagcctgggtgacatagccagacttgatctcaaaaaaaaaaaaaaagaagaagaagaagagggccatatagcttaaaggtttctagagataataactcactgtaagagtatacctagttttcttttcttcattacttgagtttcatgttgtacacatagaagaatttgaaattgtagttatgcaactgttattatagatataaaagaagttatttaaaagagagacatagttcagaaagactgaataatgaagatggttaaagatttacaaatttgttgtacattctacaagtttaccttgctttgctatttagttgcatacttaagctttgcttaaaagaatgttatacatgtgtgttaatatttacatggatgtttttaggtaaataatcattgtagatgcatgaagtatgtgtatataaataaataagaatattggaaacatggaacataaaagtaattcagaagggtaatttctgtgcacttgattcttatgagcactacacaaaatatctaaacaagtgaaataaggaaatttacatgtattaattgaaaactatctctggcattgattgtcaaaccaagtcatcagaaagttatttcttactaacttttcctcagatataattatatctgttaattttgcaaatgagttttctatacaactgaatttagtttttgcttctatctctgttgtaagcaataccacacatatagtgctactttcattaatatgagtttgatcaatagtggagctaaacttatatataggggagacgtaagaataattgcagtccgcttggtagaaggtatcacaagcacgctgtttctcttagattttatattataagtgaataaaaataaacttttctacaaatatcatatttgtattttgtatgcaatatttttattaattttatttagaagaattcagggagactggtaagatcatcctttaatcatttatgaaaatgaaagcaaaagaaaagatttatgtttacttgctagtactgtaataaggcaactgagaaatattattgaaaataaattaaggaattgtggcatttattcaagcacttggaccaaaaagggagaagagttttacttttaggaattgttacagatctccaatccctttaaaagccctgaagtatgtaaattttgtaatatgcctataggaaacatctggtggtaaaacctaacttgagccagtatgtgtgtgtgtggttttgttttttttgttttttttttttgcctttatcccacttagagtcaatattcatacatttctttgcagaaatattaatttatttgattacagagtagtaatctaaatgctactaggaatgatatataatacaaagtagctgcaccatactgatcttctaacatgagaaaaactatgatttgcaaaacatactcaatcccaagggttgtgcataagaaccgtgctaacggtacaaatggcagatcaaagctgccgtgagacctggagcaatcagaaaggaaaagttgaagtcaggtctttgaataaatgggactttttttgccctagataatttcaaattaagaatggtatcgtgcctagaccaaagatgttttgaggtgcagaagttaaaaactcagttgagttagcagtattcaaaaggaaggtccaaataggacacattgtggttattaatgacctcccaggtcacagttgaacattccattgggaattatttcctgttatagttgtatttgttggctatccagagctagcactttcggagtcctattcagtaattatgatctacattctttctgagaagctgtttttttacaacctctctagactaaccctaccaatatgactggtttgaaattgtatttaatcaatataatttgtccagttaccctaaagtgaaagatagcaattgtaatagattatttttccccgtacaacaccttaaacagttaacttggagcagtaatggaagctgcctctcaaaacacattttagcacattaaaaaaatgattttttaaattctcctggtagacaactaaatgtaaaattgtagagcatccactagagttttgctttcatcccagctgagattaattataagaagtacaatactccaaaaattaggataattctatggcatagaataaatagaaaatgataacttagctttcattgccaaacatttaaattaatatcctttggtatgcttttttctttaaagtgttttatttggtgaaaattggaatccaaaacatcatttgaaacactcatttatttcagaaaattttctgattattttattgagattatttaaatttagagtccttttttgtttttcagtttcaaacatttatggaaaattcaggtaccattaaaacatcctttttcttatttgaaatttctgtatgtaaatggtaccaatgatatccaaatttgcaactatgaagtagctaaaacactaagacaattagaaatacaattttagtgtatggttttccaagttaaaggaaagaagtatgaaatacattgtctatctttgctgtctcccttccatttagatttgtatttgattagacagagcaaacctaggcttaagttatgtaccttattagagaagttattctctaattagaagttattctctaataggcttattttccctggggatatgtgttaaacagtataactactacttttgctgccaggagctgtatcctagagatcaacagcccattctaggtattcttttataatatgcagcataccaagatgactaaggctcaccttcctgtttgaactattttatatcattgtatagacacagatgtactaagtgtgggaaaatagcatatccttcccttccagaaaagcagagactttatttagcttatctatacttctttttgctcccaatcattgatggattagcctatctgcaccacgcacttcagctgaacactgtacagatctgaaaggcttacttctgggaacagacgtttatgtatttctttacctagaaggaaaggattgtcttttcaaaacacaagggaaagtgcattttgtaattctctcctttcttccctcactcccttacttttccctcttgccttttttcctccctttttggtgttagagtagagcttcaagtatatatgtgatcattgatgaaaacttaagtgttacagtaaagctgtaatgtttagaaacatttttaagtagttgtaaagattttccaaatcaaataaaaagtggttcaatttcgatttacccacaaatacaaagaattaatataaatgtatttttcttgctacatgagcaaactcgctggaaaaaaaaatgagacatttcatgcattctagatcttggtatctcctccacataacatatgcatatatacaaacacagaacatgaactcacttccctgggacatttccaaaactatgctagacatggatccagctaaatttgcaaattctctaccagataattccttgtggtttcttctctcatccttattattttctttttctacttatattaggcttactttgttttgttttgtttttttctaattttttgaggtacaagcttaagtcattggttttagatctttctactttttaaaaaatataaatatttaaagctgtaagtttccttctacacactgccttaactgcatcccacaatttttatctgttttacttcctttgttgagtttcaaatgcttcctacatttaaatttcttttgtaacccatgtattatttagaagtatgttgtttaagtttccgatatttggagtgttcatagagatcttgttattgatttatacttcaactccattgtaatcagagaacatactccatgtaatttcagttcttttaaatttgaagattgttttaggacacattatatatgacatatcttgtcaaacataatgatatggtttggatctgtgtccctgcccaaatctaatgttgaattataatccccagtgttggaggttgggctcggtgggaggtaattggatcacaggggtggatttccccctttggtgctattcctctgatagaattctcatgagatctgcttgtttaaaagtgtatagcaccttctccttctctctcttccttctgctctggttatgtaagacgtgtctgcttccccttcgccttctgccatgattttaagtttcctgaggcctcaccagaaggagaagctgctatatttcctatatagcctacagaactgtgagctacttaaacctcttttcttcataaattacccagtctcaggtatttctttacagtagtgcaagaatggactaatacacataccatgttcactggaaaataatgtacatttttcactcattgaacatagtgttctataaatttaaattaggtcaacatggttgatagtgtgtttcagactgtttctttactaatatgtttgtctactcattctccctattaaaagagagatgttaaaatattctaatatgattgtgagattatttattcctatgattctgtcaattttgcatcatatattttaggctctgttattgactaagtacacatttgtgaatattatgtttcttcaataattgaactctttctcattattaaatatccctccttatttctggtaatggtacttgttttaaagcaaactttgtctgataataatatacatagctactctggcatcttatgcttattatttatatgcttttctattcatttattttccactcatctgtgtctatgttttttagtgcattttgtgaacacacaacatatagttgagtattgctttcttttttgagacagggtcttgctatggtgcccagtctggcctcagactcctgggctgagatgaacctcctgcctcagcctcccaagtagctggggttgtaggtgcatgccactgcacctagtgggtattgctttttaatctgttttgatctctgccttccaattagaatgtttagtttattagtgttgattataattattgatgtgattggatttagctctaaaattttaatatttatttgtttctgtgtgtctactctgtttatttctgctttgtgctctattctccctttcattctttttttgaattatatgaatatttttagaatttcattttaatttatatattacatttttcctatgtatttttgcagcatatttttagttgttgtctagggattattttatacatccttaaatttcagtttacatagagttaatagtgtatcactttatgtaaaacatagaaaccttgaaaccatatagattcatttgtagcttatcagacagggtcttagtcaccttgcgccattgctagggactgcagttgaactcaatccaaatgctcagaaatgggtaactcaccaattcctccaaattttcctcacctccaaaatgattctatttttgtttactcccagaacactcacattgttgtaacctctattttgttcagattttataattgctatctgttagagattcaatttatgaggcgtttactcctccaaaccggaagtagaactcgaactaggagtaatttttcattcattcctgtcctttaccactcctccagtaaccttccctgtgcccctgtattacatcagatagtcctgttggctctatcagtgaaagatattccatttctgacctcatctcttcattttcaatgctatgcactaccagtgtcttcatcctggacttctacactatcttgctaacctgcctttcagcttccactttaacactaccattgttttcctcacactgaagccaaagtaagataaagtaaaaatttaattttattactaccccttccttaaaaccttcaaagactccttcaagaccccaaatgaatttgtccctgcctaccttttagaacacatttgatccccttattcactaggcttaagccatactaacattctttctgttaaacacaccaggcttatatccaacttaatgccttccctgcaggctgtctctactgtcagtgcttttacctttaatctttgggtggctggatccttttcatcattgagctgtcagctcatatgtcaacttctcatagaggctttccccaaccatactgtatataatatttctagtccatctctatctcatgactaagctttattctattcataatacttaaccttatccacaagtattttgtttacatactctgcttaactacaggagaatgtaaactccatgagggcagagacttttttttactcttgatcagtgctgtatcctcagctcctagaaatagtgcctgttatagaatagccattaaataggtatatttttattgaatacacacatacatcagagatactgtgggttcagttccagaccactacaatacagtgaacatcacaataaagcaagtcacatgaattttttggtttccgagtttacactatacagaagtctgttaagtgtgcaatagcattatgtcaaagaaatgaaaacactttaatttaaaaatactttattgctaaaatgttaatgatcatgtgaaacttcagcaagttataatctttttgctgatgaagggtcttaccttgatgttgatggctgctgaaggttggagtgtctgtagcaatctcttaaaacaagaaaacaatgaagttttgccacatcagttgactcttcccttcacaaaagattactcagcagtatgtgatgctgtttgatagcattttcccatagaacttctttcaaaattggagtcagtcctctcaaaccctgcagctgctttatcaattaagtttgtggaatattctgaatgctttgttgtcatttcaataatgttcacagcatcttcaccaggaggaaattccatctcaagaaaccgttttctttgttcataagaagcaactcctcatcctcaaaagttttattatgagattgtaacaattgctattgctatttccactatatctgcagtgatttcctccactgaaatctttaattcctgaaagtcatccatgaaggttgaaattagcttctcccaaactcctgttaatgttgatattttgacatccttccatgaatcacaaatgttcttaatggcattgagaatgttgaatcctttccagaaggtttttgattgattttgcccagatccatcagagaaatcactagctatagcattacaaaatgtgtttcttaaataacaaaattgaaagttgaaataactccttgatgcatgggctacagaatggctgttgtgtttgcaggcatgaaaacaatattcatctccttgtacatctccaatcaaagcccctcggtgaccaagtgccttgtcaatgggcagtaatattttgaaaatctttttttctgagtagtaggtctcaatagtgggcttaaaatattcagctaaccatgctgtaaacaaatatgctgtcactaggcttgattgttccatttttagagcacaggcagactagatttagcataacacttaagggccctagaattttttgaatggtcaatgagctttggcttcaacttcaagttgtcagctgcattagcccccagtaagagagttagcatgccctttgaagctttaaagccaagcattgacttttctctagcaatgaaagtcctaggtgacattttctccctatataaggctgtttcatctacattgaaaatctgttgcttagtgtagccaccttcatcagtgatcttagctagatcattatataacttgctgcagcttctacatcagtacttgctgctttgcttcatcttgcacttttacagtatggagatggcttctttctttaaatctcatgaaataacctcttctagcttcaaactcttcttctaggcttcatggaattgaagagatagggctttgctctggattaggctttggcttaaggaaatgttgtgactgttgtgatctatcgaggccactcaaactttttccatatcagcaataaggctattttgcttttgtattagtgttttcacactgttttaaagatagtgccagagactgggtaatttattaaaggaaagaggtttaattgactcacagtttgcatggctggggaggcctgagaaaacttacagtcatggtggaaggggaagcaagcaccttcttcacaaggcagcaggagagagagaaatgaaggaggaacttccaaacacttataaaaccatcaggtttcatgagaactcacttgctgtcaggataacaacatggggtaaactgcacccataatccagtcattacaggtccctccctcggcacatggggattacaattggagatgagatttaagtgggaacacaaagccaaaccatataagctttcttatcattcatgtgttcactggagaagaacatttaatttccttcaagaactttttctttgcattcacaacttggctaaccatttggagaaagagacctcgcttttggcctgtttcagctttcaacatgtcttcctcactaagcttaatcatttctgccttttgatttaaagtcaaagacgtgagcctcttcctttctcctgaacagttagaggccattgtagggtaattcattggcctaatgtcagtactgttgtgtctcagggaatagggaagcccaaagggagggagagggacaggggaacaaccagttggtgtagcagtcagaaagcacaatatttattgtttaaatttaccaacttatatgggtgcagtttatggcaccctaaaacagttgtagtaacatcaaaggtgatggctgacaaataaccataacatataataagaatgaaaaagtttgaaatatcacaagaattactaaaatgtgacagagacacagtgagcatatgctgttgggactatgtcacggatagatttgctagatgcagggttgccacaactcttcaatttgtaaaaaaaaaaaaaaaaaaaaaaaaaaaagtatctgtgagtacattaaagtaaagagcaataaaacaagatatggctatgcttaatttgccagctggacttggtatatgatttattgagcctcctttccttatctatgaaatttgggtattaaaacatatatcatagaactattgtaagaattatatgtttaagggatataatgtagtgcctggctcacatttgttactcagaaaaattatcttattgagaatcacaaaaaagaaaggagacatctaatatgtcctactttttctcagagcaagaaaaattatatatattttttgaggattataccacaaccttgagagaaaaagtgagaggaaagaaccttagagctcatattatccaagatgatagaaaaatactttaagcaagcctgggagctctataaaatctgattcaaccctccctccccttactgcctcaatccacaatgaattttatattattccatttgtagtctggaatttataatctggaaagttctctggaaatgttggaatgggattcagactatgggatgatcaaggctatcacaatctcaagcaaaattcatttatccatttgtggagcactcctatgttaggagaaaaggagaaaatcactgataaaccttttttttttaatgggagttgatggtttttaggctcattctttttcagagtggctgtactccgaggttaagtagccctgctttcctcgtccacatggcacatccctctttatcattaaaggctcatttctaacatcatctgtctctttttgccccagcagaattcataattccttcacatgtgccctcaaagcactttattcaaacattgattatattatattgtaattatttatctatttgttctcctttccacattactgtaagattttaagtagaaaatactccttactaatatttattgtattaactcctagcacagttactagagcatggtagttcactcaaaaacagacgctgtagcaagcactatttctgagcaatgggaatagagcaatgataagacagaaaagacatctgccttcatgagcaagtaggaggtggcatgactgagctaacgtgcttaacatcccctgcctcatagtaaatgatatttttaagtgaagaatcaccatctccctgacaacacattacaaagtataaatcaaagggctatcaataagtgttacttaaataaaatagtgtgtggtcaaatgaatttaggaaatgttgagtacccaaacagtaaacagttttgtttacttcagatttccactattgtggaaaacttcaccaggttccctaaagttagttaatcaagtcttcctaagtgtattctaaaacatttgttacaccctctgttgctctatcttaagacatctgtaagagaaaatcttctagctcttttacaaagggtcattgccatctttaaatagttcagaatcaataagatccgtctattgctttgaaaagaatgtgcttttagagaaggcagaggtcatttattatcagctaaatgtacatcattttatgttcattatttatatttagaattagaaaaaaacttccattaaaggttaaatcaatggattatggattagtgagttgtgaagtgtgtgctgagttttctagtcatgatatatgccattgttttaaatacataaacctcctttatgtgaaagaggaaataatgaaattgattacgagtgcagctgtccatctgtaattataggttgtgtaacctgtgtacaaaatcttgggtttttattaacatgttatcgttattaattttacatgaactatttaaattttggatattgagtcaaaataagcaaaattctgataattacctaaattggggaaatagtttaaaaccacttcaaaaggtgaacaagaaaatatttcagacattttaatataaaatttaaatataattgcaataacagatataaatctcgaagtaaatacttaaaaagtttaaattatataaatacatctgttatgctgatctttagaaaaatattttatacctgaatagtaaaaatgagttcaaaattaaatgttatctttaaatatcaattttaaataagtacaaaatcatttctgtattgtgaatgccatttttaaaaatatttatccacattaatgagaatttggaagaaaaaatataatgaaagattgccatatggatgctgaactagcagttctttttcttgttcttttattattataatactcttaatgtggcaaatataagtcagggagagaaaattactttgagatggcttacagttttaaggactgacatgtgtaggaaaagaaccgaaccacacagtgtggagagtttgattgttttctgaatgggcacaaaagtgaaaacttcagccaagttaagagcttttgtaaataggaagttaattgtaaaactaacaagtacactttttaattagtttaaaagcagatgtgtttgataactttttggtgggatggaaacatttttctttggcatgtctcataaatatcagaaagaatcaaatacaaataggccggattgcatttaattactgagatgattgcatagcctaaagcagacttcacgaaggcagactaaattgtcaccatgttcttaatttactatgttgtattttcctttttgggctaaaagtgttattggcaaataattccctcctacaaaagaacaataagcttcttaaaaagtgatgcttttagttccattatcagtagtttcataactacttccacctcacttagtggagaagcaaaataggacatacatgattttgttaaaatccataagcatgtttaacacttaggagctttcctctgcctttgaagactattctgtgtcataactttgttttaaaatttatgtctacttttattgcatgaaaaaactgtgagacagcaatcacattaacaaataataaataaaaaattaattaaaataaattacttaaaattgtatttaaatattttctttgaaatagttattaatgttaatatgattaataacaaatattaataatagctgcctattatttgcaaacactattataagtactatagggttgcaaagctgcatgaggtgaatatcccgatctcttgttgcttacaatctagtaagagtgtcaaggtataaatgcatgaggcattaaattaacagttgagatccaaaaaaagaacaatacagaaataacgccgcatgtctacaactatctgatctttgacaaacctgagaaaaacaagcaatggggaaaggattccctatttaataaatggtgctgggaaaactggctagccatatgtagaaagctgaaactggatcccttccttacaccttatacaaaaattaattcaagatggattagagacttaaacattagacctaaaaccataaagtccctagaagaaaacctaggcattaccattcaggacataggcatgggcaaggacttcatgtctaaaacaccaaaagcaatggcaacaaaagccaaaattgacaaatgggatctaattaaactaaagagcttctgcacagcaaaagaaactaccatcagagtgaaaaggcaacctacaaaatgggagaaaattttcgcgacctactcatctgacaaagggctaatatccagaatctacaaagaactcaaacaaatttacaagaaaaaaacaacaccatcaaaaagtgggcgaaggacatcaacagacacttctcaaaagaagacatttatgcagccaaaaacacatgaaaaaatgctcatcatcactggccatcagagaaatgcaaatcaaaaccacaatgagataccatctcacaccagttagaatggcgatcattaaatcaagtcaggaaacaacaggtgctggagaggatgtggagaaataggaacacttttacactgttggtgggactgtaaactagttcaaccattgtggaagtcagcgtggcgattcctcagggatctagaactagaaataccatttgacccagccatcccattactgggtatatacccaaaggactataaatcatgttgctataaagacacatgcacacgtatgtttattgtggcactattcataatagcaaagacttggaaccaacccagatgtccaacaatgatagactggattaagaaaatgtggcacatatacaccatggaatactatgcagccataaaaaaggatgagttcatgtcctttgtagggacatggatgaaattggaaaccatcattctcagtaaactatcacaagaacaaaaaaccaaacaccgcatattcttactcataggtgggaattgaacaatgagaacacatggacacaggaaggggaacatcacactctggggactgttgtggggtggggggaggggggagggatagctttaggagatatacctaatgctaaatgacgagttaatgggtgcagcacaccagcatggcacatgtatacatatgtaactaacctgcacattgtgcacatgtaccctaaaacttaaagtataataataataaaatttaaaaaaaagaacaatacaatgattaattgccaaatttacaagcaagagtattttagagagaggaatgtcatgtgatacgaaataaatattagaaacatagcaaagaagaatacacaattaattgccaattcgataagcattaaaattttaatgagaagaatagcatagaacttggaatgaacacgattggaggaaacagtcagaagggagtaaagattctaaataatgcagtaagagagatgatactggaaagggcacactctgtggaccctgagaagcagcataggaaatttacttcaatatttctgtcatttcagtaagtattgcattaaaaattgttatgtttgaaaagaaacaaatctggattttttgaaaacatattgttgtagaaatagaaatgcaaaaatacatgcactttagtctgtgtaacagttgatgtaattactatttattggtggactcatggcaggcactaggaaaagagcattataagaactgttacatccatatgaatgagaaacgaatactcagagaagctgtcatttacctagtaggtggcagggctgggatttgaacccatatcttagtagactgtctcatgctgctgctgctgctactgctgctttcttatatgtgctaggcactgggctaaacactttacatatattccttctatcagttttacaaaatcgatttaatttatcccaattttgtgaatgaaagaactgaggtttagataattgcagtagtaaaaatcatgaacttaataattttaataccaggcttgtaaatgtgacatagctaataagacatctttaatataaaatattttatgagatttaaaaaacattgattttgctgtgatagacgtagtttcaaaaacaattgacaattgtacaatttagcatttaaggatattcctcaaagtaagtccttttctgtgggatttctaacagtaatcaaatgttgaagtcttatggggaagaatttttaattataatttctaaaaataattgaataagcctattccatatagcagtaattattaagatgaaagaatgcctactttcttccaagtgtggtaattgctcagtagaattagctatttcacaagtaattttacagttttgttaattaagattaaagtaattatcttggccctaagattgctttaaattgagagtctagctctactggcagaaaagaaaaagagtgtataagagctctaaaaaggtttgtatgctattcctgccccctccatctccagaaaaaaaaggctgagtcagaaaaagagcttgttaaagacgcgaagagtgaaaatgcaattccacatttgtggtaatagagagcttattgaataaagctaaaaacaaatcatttctctctttttactctccagccctgccttcttgtttaatatttggagtcacttttttccttcatgttaataaagtgaaaaaatatactcattatactaaatttttcctcaatggcttcacctttaaaaccttccattgacctcagccaaatcttttttttttttttcatttatttcaataggttttggggggaaaagatggtgtttggttacatgaataagttctttagtggtgattttcgagattttggtgtacccatcaccggagcagtgtacactgtacccaatttgtagcgttttatccctcatcccctcccaccctttctttgagtccccaagtccattgtatcattcttatgcctttgcatcctcatagctcgtctcccacttacgagtgagaacatatgaggtttggttttccattcctgagttacttcacttagaataatggtctccaattccatccgggtttcagtcaaatcttttatgtaggatcacacctggtgacctttaagaaattgaaccatcacaagaaatcagttggcagtgttctactggggtggctcttcctctttagtcatagattaaggaaagctcaagaaccacaactctactgctctgtctgaacactcaattgttaattttgttcctcttcttttagctgaaattcagattttataaatattgtgaataaatattttgtgagagttgagctcaatttcctggacaacacacttaaaatacttgctcttatgtcttacagttgcatacagaacctgaccagatgtttatgggtttttttttcttttttctttgctctttttttttttttttagacagagtctcactctgttgcccagaatggagagcagtggtgcaatctcagctcacggcaccctctgcctcccaggttcaagcaattctcctgcctcagcctcccaggtggctgggagtacaggcacccgccaccacacctggctaatttttgtgtttttttttcagtagagacagggtttcaccatgttggccaggctggtctcgaactcctgacctccagggatccacctgcctcagcctcccaaagtgctgggattacaggcatgaaccactgcacccggcctattttttttcatctgtggttatcacattgaaattatcccttaaagactataaaaccactttattccttcagataccagaaaattaggcttatagggaatgataaccaagagacaaaaagcaacagctaaattttttttgttcttaaaaaaactgcttttcctgaagaaagtaaaataaaataaagcccagattaaagaatcaaatataaagacatctaatactcttatcagaagacctttctgcatcatttcaaaaaaaaaaaaaaaggctgtaagcctctgataagattattttaaggacagaatgaagatttcctcttgaatgatttgctctgccctttatcaaaaagacatgtgtctgtccactttaacatttctggtataaatataccttgtcctttaaaaattactgcataacattaaaatcacgagcattgctatacatcatcaacagtcaagccagagagccaaatcaggaatgaactcccattcacaattgccacaaaaagaatcaagtacctaggaatacagctaactagggaggtgaaagatctctatgaggagacctacaaaccactgctcaaagaaatgagaaatgacacaaataattggaaaaacattccatgctcatggataggaagaatcaatatcattaaaatggccatactgaccaaagcaatttatagttttaatgctattcctattaacctaccattgagattcttcacagaactagaaaaaactattttaaaattcatataggaccaaaaatagcccaaatagccaatgcaatcataagcaaaaataataaagctggaggcatcacactgtccaacttcaaaatatactacagggctacagtaaccaaaacagcatggtgggtacaaaaacagacacatagaccaatggaacagaatacagaacccagaaataaaaccagatacataccactatttgatctttgatgaacctgacaaaagcaagcaatggagaaaggatttcttattcaataaatttagtgctaagataagtggctagccatatgcagaagattgaaactggaccccttccttataccatacacaaaaataaactcaagatggattacagacttaaatgtaaaacccaaaactataaaaaccttggaagatagcctaggcaataccattcaggacgtaggcatgggcaaagatttcatgacgaagacaccaaagcaattccaacaaaagcaaatattgacaaatgggatctgtttaaagagcttctgcacagcagaagaaaatatcaatagactaaacagacaacttacagaatggaagaaaatttttgcaaactatgcatctgacaaaggtctcatccagtatcttttaggaacttaaacaaatttacaagcaagaaacaaacaacccaattaaaaatgggaaagaacatgaacacttttcaaaagaagacatatatgtagccaataatcatatgaaaaaaagttcaacatcactgatcttaggagaaatgcaaatcaataccacaatgagacaccatctcacacccgtcagaatatggctataattaaaaagtcaaaaacaacagatgctggtgaggtagtggagaaaaaggaacacttgtacattgtgggagtgtaagtcagttcaaccattgtggaaggcagtgtggcaattcctgaaaaacctgaagacagaaataccattagatccagcaatcccattactgggtatatacccaaaggaaataaatcattctgttataaagacacatgcatgtgtatgttcattgcagcactattcacaataggaaagatacggaatcaacctaaatacccatcaatgatagcctggataaagaaaatgtggtacatatacaccatggagtactgtgcttccatgaaaaagaatgagatcctgtccttcacggggacttcgatagagctggaggccattatcctaagcaaactaacaggcacacaaaatgaaacaccacgtgttctcacttgtaaatggaagctaaatgatgagaacacatgacacatagagggaaatgacacacactggggcctatatgagagtggagggtgggagaacagagagaatcaggaaaaataactggtgggtactaggcttaatacttggatgatgaaataatctgtacaacaaacccccatgatacaagtttacctatgtaacaaacctgcacaagtacccctgaacttaaaagttaaaaaaaactactgtgtaacattaacatgatatttcaaagttcactgtaagtgaagagtttacttgcatagtgtattttatgcctagatgttttatttttcatattatgtaactaataataagttatcatactttaaccaaatggttctacctgtttctctttctgataaataagtaaatttggagtaaaagtgatgccaagaagtaaaatatattgctgcagtgagcaatacaggggaaaaggaaggcagaaggtagcagaaactacaaagggggaagtgtagagagggccgcagcttaacaaagtagtagctcagtaaaagaaacacatactggaattaaaattttagacaaaatgttactttcctatccactttcttttttcatgtctttatttgatttggttgataacaaacttttctaattattaagtataggttataccatctaacctatactttaattatattcatgcttttttgcctaaagtttcattattattagtgggggatctttttgatttgatactggcatttattactgtcttcctctagttgaatccaaaatgtttcagagaatttatcaagaatcatcattaataataactatatcctactgatatgcatggaaataaatggggatataaacaaaaagttgaaatgcatctcagtgatgtatttacaattctgattataaaatcctatctttccttccatgtttagcaatcacatggagaaggcacaaattagtctggctttaaaacattgaactaaaaactaggatttgactatctgagccatagctttacagtgtcagaatatgagagtatacttcgtaaaggcaggaaggatgcatttttcaagaacttcaccaattaatttgcaatgtaaattgatataataaccagataataatacacaaccctaggtaagggggaatggaagagtgtcagagaaagaagaccctgaaataatacataggcaagagtcagaatagtagtaatggcttaagatatatatcagatgtaagaggggacttcaaaaggttcacagaaaaatggaattaaaagataggaataaagacatataaactttatccctcaacataaataccatcaagttcaggacacttttgtaagtgataccagccatttagtccatccctaaagaactgagggtcttggaatttaacatgtcagtacagtttttttacattattaactgaagaaaagggtaccctttacaaactttttaagattaggaaacaaaaagaagttacaaggagccaaatcaagactgcatgatgcactcctgctgatttcccatagaaactctgaaaattgcacttgtttgataaggggaatgagcaggaacattatcaagtcagaggactctctgatgaagctttcctgggcatttttgtgctaaagctttagcggactttctcaacacactctcataataagcagatattatcgttctttggttctccagaaagtcagcaagcataatgccttgagcatcccacaaaactgttaccatgacctttgctcttgaccagttctcttttgctttgactggaccacttctacctcttggtagccatttttttgattgtgctttgtttttaggatagttaagttttatctcctgttacagttgttcaaagaaatacttaaaggtctttatcctacttgtttaaaatttctgttgaaagctctgctctcatatgcagccaatatgggtgcattgattttggcacccatccagtggaaagtttgcttaactttaatttctcagttagaatttgtaagccgaaccagttgagatttctacagtattggttattatgtccaattggtcctcttcaattagcgtacaagcaagattaatttttttgatgaattgttgtagatgatttgcctctgcctctgcaggcttcatcttcaacactgtcttgtctcttcttttttttttttgagacagagttgtactctgttgcccaggctggagtgcagtggtgcaaacacacctcattgtaaaccttgacctcctgggcacaagctatcctcctgcctcacctcctgaatagctgggaccacagacatgtgccaccatgccctgctaatgtttttcttttttgttttttgttttgttgttgttgttgttgttgtttagtttttgtagataaagggtcataccatgttatccaggctgatcttgaactcttgggctcaagcaatcctcccatctcagcctcccaaagtgcaaggattacaggcatgagccaccacatttggcttgtctctttaaaaagtcatccatcaacacctgtgaaaagaagggggacaatacaagttttttatttgtaaacttctgatttctttaattcttcccatgtttttttaaccatcaatgattttatcattcttccaccgaaactttaccataaatttggtacttgttcttagttcagttgtagcagcacttaacgttgctctgagagggttttgttcaaactgatgtcttacccttcttagtgccttaaactatatcctgttcagacatgtagcaagttagtacaagtttattttggtgcaaaaaatttgaaatccatgcataatgttttcataatacacattttccatgaactttttgaagtctgctagtatgtgtatagatatatattataggtaagagattttgtgtgtgtgcacacatgcatgcacaaacccacagcattgcggtactatatatcactgagaatacatccaacaggacacaagacatgttaactaaaagggcgctgacctttcttatggtggagaacagtgccagtaaatatagactgtgtcttttcaacatattttgtaatcatgtttcattagtgatttctcatatatatacttatacattcacctgtgcggcaagtgggttcccccattttcattactttgtctcacctctttccttcaatttggcaaaaattttaactataagtttgtttttattatgaaatagactgaaagctgcacaaaggctagaatcatgctgatatttacctagtatgcatacctcgtatttagtctgtggcttggctcatagatttgtacagtaagtgtttgttctaatgaatgaacatagacattacacatacagtactctatgtatatcatagttatcactgtttatccagagtatttagtactggttttagagaggcaggaaacagctatgctggtgctgtcaatgtagtattcttaagatagtccattttcttggttgcttttcttgcagttagaagcggtgcagcataagcaaggaagtcagactgcctgaggacacattctgccaccagctagttgtatgatcttgggcacattacttaaccactctgtgcttccatttcttcatctgtacaatgaattaataatagtacctatctcaaagggattaatgaaaagtagttgagtagtgagtagatatgtgtacaatatttagaaaggtacctaaacacaataagctctcagtaaatattggcctattttcttgatcactaaagtggtaggaagggaatattactaattatatactagctcttaaagtttttgtctggaaatgtctcacttctgctcacattttattagctggaggaggtcacatcaacatgattaagttcaaagtgatagaaaagtacaattttaaaatgtgtattgaaggagaggataaccatttgtaactctcagtacttatgtttttgtttaatcttggtaggattagaattcatgcacagaagtcctgacctcaatgattaccacttaactcttgtagccaaagggaaattctgtttcttatgtattttttgtgtgtatttagtaaaatattcctttgtttacttcactctttcctctgttccattggatagtttttgttactacgtattaaataatcaattaattttcagtagtgcttcaccaggtaaattcaggttcctctgtagcttttaaaggggaaccattcctgaggggccaggaggctttaaggaaaatcaagtacatgctcataagctgaaaatgcaattatcaaaaattttattgaggaaactatgagtacctaaaccctatttatctaaaaataacaccaagttccagctaatgaacatcattatatcaatagtaatattaattatcataatacaacctaactggaaatcttcccttcattaattattgattgttcatatgttcttttcttgcagtagtacactgttctcgtatagccacactcatgaacaaaatatacatatgatgctcaatgtttctgtataatttagtcattaatggcacaaagatataaagaacaaaaaataaacaaatgaaaagaaagcatatgataccacactcaccttcctagtgttgacactggaggtatcatacatgagataataaaagtataagctagcaaatccaaacagacttcggtgtagcatgagtacccatgcaactgtggagacagtagcataagtggctcctgtctgttcaactgggtactctccaaatacaggaaatctaaattagcccttcttcatgaaaagaaatgcttttatataccaaactgaggacattcgttgaaactcttagagcagtcagaatatactgactaaataggcatatcataggataacatgaagttttgatcatgcttacaaattattaataatagtcacatctacagttactcttttttttattatactttaagttctggggtacatgtgcacaacgtgcaggtttggtacatatgtatacatgcgccatgttggtgtgctgcactcgttaactcgtcatttacattaggtatatctcctaatgctatccctcctccctccccccacctcacgacaggccccagtgtgtgatggtccccaccctgtgtctaactgttgtcattgtttaattcccacctatgagtgagaacatgtggtggttggttttcggtccttgcgatagtttgctcagaatgatggtttccagcttcatccatgtccctacaaaggacatgaactcatccttttctatggctgcatagtattccatggtgtatatgtgccacattttcttaatccagtctatcattgatggacatttgggttggttccaagtctttgctattgtgaatagtgccacaataaacatacgtgtgcatgtgtctttatagcagcatgatttataatcctttgggaatatgcccagtaatgggatggctgggtcaaatggtatttctagttctagatccctgaggaatcgccacactgtcttccacaatggttgaactagtttacagtcctaccaacagtgtaaaagtgttcctatttctccacatcctctccagcacctgttgtttcctgacttgattcaatgatcgccattctaactggtgtgagatggtatctcattgtggttttgatttgcatttctctgatggccagtgatgatgagcattttttcatgtgtcttttggctgcataaatgtcttcttttgagaagtgtctgttcatatcctttgcccactttttgatggggttgtttgtttttgtcttgtaaatttgtttaagttctttgtagattctggatattagccctttgtcagatgagtagattgcagaaattttctcccattctgtaggttgcctgttcactctgatggtagtttcttgtgctgtgcagaagctctttagtttaattagatcccatttgtcaattttggcttttgttgccattgcttttggtgttttagtcatgaagtccttgcccatgcctatgtcctgaatggtattgcctaggttttcttctggggtttttatggttttaggtctaacatttaagtctttaatccatcttgaattaatttttgtataagatgtgaggaagggatccagtttcagctttctacatatggttagccagttttcccagcaccatttattaaatagggaatcctttccccatttcttgtttttgtcagatttgtcaaagatcagatagttgtagatgtatggtattatttccaggggctctattctgttccattggtctatgtctctgttttggtaccagtaccatgctgttttggttactgtagccttgtagtatagtttgaagtcaggtagtgtgatgcctccagctttgttcttttggcttaggattgacttggcgatgtgggctcttttttggttccatatgaactttaaagtagttttttccaattctgtgaaaaaagtcattggtagcttgatggggatggcattgaatctataaattaccttgggcagtatggccattttcacgatactgattcttcctatccatgagcatggaatgttcttccattcgtttgtgtcctcttttatttcattgagcagtggtttgtagttctccttgaagagatccttcacatcccttgtaagttggattcctaggcattttattctctttgaagcaattgtgaatgggagttcactcatgatttggctccctgtttgtttgttattggtgtataggaatgcttgtgatttttgcagattgattttgtatcctgagactttgctgaagttgcttatcagcttaagaagattttgggctgagatgatggggttttctaaatatacaatgatgtcatctgcaaacagggacaatttgacttcctcttttcctaattgaataccctttatttctttctcttgcctgattgccctggccagaacttctaatactatatcgaataggaatggtgagagagcgcatccctgtcttgtgccagttttcaaaggaagtgcttccagtttttgcccattcagtatgatagtgagtgctcttattattttgaaacacatcataaattgctctaattttgagacacgtcccatcaatacctactttagtgagagtttttagctgttgaattttgtcaaaggccttttcagcatctattgagataatcatgtggtttttgtctttggttctgtttatatgatggattacatttattgatttgggtatgttgaaccagccttgcatcccagggatgaagccaacttgatcgtggtggataagctttttgatgtgctgctggatttggcttgccagtattttattgaggatttttgcatcaatgttcatcaaggatattggtctaaaattctctcttttttgttgtgtgtctgccaggctttagtatcaggatgatgttggcctcataaaatgaattagggaggattccctctttttctattgattggaatagtttcagaaagaatattaccagctcctctttgtacctctagtagaattcagctgtgaatctgtctggtcctggacttttttggttggtaggctattaattattgcctcaatttcagaacctgttattggtctattcagggattgaacttcttcctggtttagtcttgggagggtgtatgtgttcaggaatttatccgtttcttctagattttctagtttatttgtgtagaggtgtttacagtattctctgatggtagtttgtatttctgtggaaacggtggtgatgtcccctttatcattttttattgcatctatttgattcttctctcttttcttctttattagtcttgctagcagtctatcaattttgttgatcttttcaaaaaaccagctcctggattcattaattttttgaagggttttttgtgtctctatttccttcagttctgctctgatcttagttatttcttccttctgctagcttttgaatgtgtttgctcttgcttctctagttcttttaattgtgttgttagggtgtcaattttagatctttcctgctttctcttgtgggcatttggtgctataaatttccctctacacaccgctttaaatgtgtccccgagattctgctatgttgtgtctttgttctcattggtttcaaagaacatctttgtttctgccttcattttgttatgtacccagtagtcattcaggagcaggttgttcagtttcgtgtagttgagtggttttgagtgagtttctttactcctgagttctagtttgattgcactgtggtctgagagatagtttgttttaatttctgttcttttacatttgctgaggagtgctttacttccaactatgtgatcaattttggaataggtgtgatgtggtgctgagaagaatgcatattctgttgatgtggggtggaggttctgtagatgtctattaggtcctcttggtgcagagctgagttcaattcctggatatccttgttaactttctgtcgcgttgatctgtctaatgttgacagtggggtgttaaaatctcccattattattgtgtgggattttaagtctctttgtaggtctctaaggacttgctttatgaacctgggtgctcctcttttggatgcagtgcatatatatttaggatagttagctcttcttgttgaattgatccctttaccattatgtaatgaccttctttgtctcttttgatctttgttggtttaaagtctgttttatcagagactaggattgcaacccctgctttgttttgttttccatttgcttggtagatctttctccatccctttattttgagcctatgtgtgtgtctgcatgtgagatgtgtctcctgaatacagcacactgatgggtcttgactgtttatccagtttgccagtctgtgtcttttaattggaacatttagcccatttacatttaaagttaatattgttatgtgttactcttaaagacattattattagagtattttctattgttttttctatagtgactcatttgcagaagaaaatggcagaagaataacttattatgttgaaatactaaatagaaggagtgatgcaggaggagtttagctaaataaacagaagaaactatgtgcttgtatagtgatgaatttcagtaggaaaacagagtgaagaacatatgagaatgaaaggaaaggaaatgcatgatgttgttttaccacaagaatatatgctcagcactgagaatattgcctaacacaaaatagatgctcagtaaatatatttttgaatgagaaccatagaaagaaggatggaaagaaatagacaagaaggagtttgaacagaaaacagatgatgatatcctagattggtaacctggcacagatgccaaatataatggtgttggaacataagccttttttgaacatattattctacagtagaaaaacgtctcatgattcatgacttggtggtaaacaatattatcagaaaaatgagaatataaggagagtattatttgtatactctatgttttagttcgttgaggctgctataacaaattacaggctaagtattccttatatgaaacgcttggggccagagtgttttgaatttaggatttttttcagattttggaatatttgcatgtacataatgagatatcttggggatgggacccaagtttaaaaacaattgtctatgtttcatatatataccttatacacatagcctgaagattttatacaatatttttaataattttgtacatgaaacatggtttgtgttaagtacttatatgtggaattttccacttatggcatcatgtcagcactcaaaaagttttgggttttggaacattttggattttcagattagagatgcttaacctgttccataaactaggtagcttatgaacaacagaaatttatttcttgcagttctagaagtgagaagtccaggatcaaaataccagtagatttggtgtttcgtgagggccccacctcctggttcatagaacagtgccttctccctgtgtcctcacatgatggaagtgacgaacaggctcccttgagcctattttataagggcactaatcccattcacaagcgcttttctttcatgacctaattactttcccaaaagccccagcacatcataccatcaccttggaggtaaggatttcaacatatgaattttggacagaaaccatactaatgacagtgtttctgaacatttctttattagaaactgcttttggaaaaatgtaataaaactctagacttctccctcaaaaatacgtatgtacatataccataaaattttgtagaccatttcaggagttttgtgaatctgtaaaactcatccattggttaatgatgagtgccacatttttaaataatgtgaatgttgggttaatatctacccccaccccccgaaaaacatgaaaagaagagcacagaagtgccaaggaacaacacaaagctctgagatagatatcagaaggaccaaaacccagaataacctgaggtgcagtctaaaaaagtaatagaactcctccatcaggtcccacagtatagtagggtatagcccattatctttccatttagtgattataattttttgtgtccacatattcactgctagtatatagaaatacaattattatttgtgtgtctatcttgcatctcgtgaccttgcttaactcagtccttagttctaggagtgtttgacagattttgcatgattttttacatagacagtcatgttatctgcatatagggacaattttatttcctctttttctatttatattcctcttatttcctctcttttgccttactgcattggctagaaatttcagtactctgttgagtaagagtggtaacagcagacatctttgccttattcccagttttaggtggagaacattcagtctttcactcttaagtataaagttagctaaagttttttgtagacacttttatcgagttgaagaaattgccttttattcctgttttcctgaacttttctaaaattgtgaatcgttgctaaattttgtcaaatatcttttataatgactaatatgatcatgtgatttttcttcttcagctgttaatgtaatgcactacattgattcttaaggatttttttgtctatataaaggatggatattggtctgtagttttctttttttgtactgtttttggtttttgtatcagggtgatgttagctataataattattgagaaatatttcttcctattctgttttctggaagagattatgtataattggagttaattcttctttaaatgtttaataaaattcttcagtgaaactatctaggcctggagatttggggaaagaggagtaaacatcttaaatttctttaattgttacagagttgttcatattatctttttcacattgggtgagttgtggtcattcatgttttttggtccatttcttctaagctgccaaatttatgtgtgtagagtctttcacagtatccactccttcttttgatgtcttcagagtcactagtgatatcccctttttcattcctgatattggtaatttgtgtctactcttttttactttgtcagtctttttagaggtgtgtcagtgttattgatttttttcaaagaaacagctctttgtttttgttaatttttctctgttgtttttctgttttcagtttcactgatttttattgatttctgcttttttattgtttcctttcttctacttgccttttatgtgttcttaaggtgagaatttaggttactgattttaaatgtttcttcttttctaatatatgcatttagtactatagattaccctctcagttctactttacttgtgtccaacaagtgttgatattttttattgtgattttcattcagttctgtattcttttggttttccctcgagaattcttttttaaatcaagggttatttattttttctgccttcctgtgggtgacttggtcattttttagaattctgttttgatttatctatgtttcttagtatatccctttgtgtagcttttttagtgtttgctctaagtattacattttttgtgcatagccttatcagtctactggtgctaacattctgtcagtccatgtgaaatatagacactatgtcctttcacatccctttgccttcccccatttataatatagttatcttaaatattaccagtaaatatacttagaaccacatcagtgttacaatttttgtttcaacagtaaaacataatttagaaaactcaggaggaaaaggaaagcctattatagatagtcatgttttgcttattgtgttctttcttcctaatgtttcagtgtttcttctattacttctctcatgtttacaggactgcctatagcctttcttttagactagctctgatggcaataaatattctgttttttacttcatctaaagatgtcttcacttgttatttctggaggtctcatcactggctataggatttggggttgacggttcttctcttttagcacctaaaaaatattttgccactttctctggtcatcattgtttctgatgtaaaatatattgtcattctgttttacttctgcagatgagatgccacttttctctggctgctctttagactttctttgccctcagttttcagaaatttaattatgatgtgtcttagcatggacttccatggatttatcatgtttagagttcagtaagctacttaaatctgtacatttatgtttttgccaaatttagaaagttttccgccatttttttgtttgtttgtttttttttttttttagattcttcgttctttcacatgcagagcatcttttttttttaattttattattattatactttcagttttagggtacatgtgcacaacgtgcaggtttgttacatatgtatacacgtgccatgttggtatgctgcacccattaactcgtcatttagcatcaggtatacctcctaatgctatccttcccccctccccccaccccacaacagtccccagtgtgtgatgttccccttcctgtgtccatgtgttctcattgttcagttcccacctatgagtgagaacatgcggtgtttggttttttgtccttgcgatagtctgctgcgaatgatggtttccagtttcatccatgtccctacaaaggacatgaactcatccttttttatggctgcatagtattccatggtgtatatgtgccacattttcttaatccagtctatcgttgttggacatttgggttggttccaagtctttgctattgtgaatagtgccacaattaacatatgtgtgcatgtgtctttatagcagcatgatttatagtcctttgggtatatacccagtaatggggtggctgggtcaaatggtatttctagttctagatacctgaggaatcgccacactgtcttccacaatggttgaactagtttacagtcccaccaacgtgtaaaagtgttcctatttctccacatcctctccagcatctgttgtttcctgactttttaatgatcgccattctaactggtgtgaaatggtatctcattgtggttttgatttgcatttctctgatggccagtgatgatgagcattttttcatgtgtcttttggctgcataaatgtcttcttttgagaagtgtctgttcatatccttcgcccatttgttgatggggttgtttgtttttttcttgtaaatttgtttaagttctttgtagattctggatattagccctttgtcagatgagtaggttgcaaaaattttctcccattctgtaggttgtctgttcactctgatggtagtttcttgtgctgtgcagaagctctttagtttaattagatcccatttgtcaattttggcttttgttgccattgcttttgatgttttagacatgaattccttgcccatgcctatgttcctgaatggtattgcctaggttttcttttagggattttatggttttaggtctaacatttaagtctttaatccatcttgaattaatttttgtataaggtgtaaggaagggatccagtttcagctttctacatatggttagccagttttcccagcaccatttattaaatagggaatcctttccccatttcttgtttttgtcagatttgtcaaagatcagatagttgtagatatgcgtcattatttctgagggctctgttctgttccattgttctatatctctgttttggtaccagtaccatgctgttttgtttactgtagccttgtagtatagtttgaagtcaggtagcgtgatgcctccagctttgttcttttggcttaggattgacttggcgatgtgggctcttttttggttccatatgaactttaaagtagttttttccaattctgtgaaaaaagttattggtagcttgatggggatggcattgaatctataaattaccttgggcagtatggccattttcacgatattggttcttcctacccatgagcatggaatgttcttccatttgtttgtatcctcttttatttcattgagcagtggtttgtagttctccttgaagaggtccttcatatccgttgtaagttggattcctaggtattttattctctttgaagcaattgtgaatgcgagttcactcatgatttggctctctgtttgtctgttattggtgtgtaagaatgcttgtgatttctgcagattgattttgtatcctgagactttgctgaagttgcttatcagcttaaggagattttgggctgagaccatggggttttctagatatacaatcatgtcatctacaaacagggacaatttgacttcctcttttcctaatcggatacctttatttccttctcctgcctgattgccctggccagaacttccaacacattgttgaataggagtggtgagagagggcatccctgtcttgtgccagttttcaaagggaatgcttccagtttttgcccattcagtatgatattggctgtgggtttgtcttagatagctcttattattttgagatacgtcccatcaatacctaatttattgagagtttttagcatgaaggttattgaattttgtcaaaggccttttcttcatctattgagataatcatttggtttttgtctttggttctgtttatatgctggattacatttattgatttgcgtatgttgaaccagccttctatcccagggatgaagcgcacttgatcatgggggataagcttattgatgtgctgctggattcggtttgccagtattttattgaggatttttgcatcaatgttcatcaaggatattggtctaaaattctctttttcagttgggtctctgccaggctttggtatcaggatgatgctggcctcataaaatgagttagggaggattccctctttttctattgattggaatagtttcagaaggaatggtaccagctcctccttgtacctctggtagaattcggctgtgaatccatctggtcctggacttttttttcgttggtaagctattgattattgcctcaatttcagagcctgttgtaggtctattcagagattcaacttcttcctgttttagtcttgggaggatgtatgtgtcgaggaatttatccattttctagattttctagtttatttgcatagaggtgtttatagtattctctgatggtagtttgtattctgtgggatcggtggtgatataccctttatcattttttattgcatctatttgattcttctctattttcttctttattagtcttgctagcagtctatcaattttgttgatcttttcagaaaaccagctcctggattcattaattttttgaagggttttttgtgtctctatttccttcagttctgctctaatcttagttatttcttccttctgctagcttttgaatgtgtttgctcttgcttctctagttcttttaattgtgatgttagggtgtcaattttaaatctttcctgctttctcttgtgggcatttagtgctataaatttccctctacacactgctttgaatgtgtcccagagattctgctatgttgtgtctttgttctcattggtttcaaagaacatctttatttctgccttcattttgttatgtacccagtagtcattcaggagcaggttgttcagtttccatgtagttgagcggttttgagtgagtttcttaatcctgagttctagtttgattgcactgcggtctgagagacagtttgttataatttctgttcttttacatttgctgaggagtgctttacttccaactatgtgatcaattttggaataggtgtggtgtggtgctgaaaagaatgtatattccgttgatttggggtggacagttctgtagatgtctattaggtcctcttgatgcagagctgagttcaattcctgggcatccttgttaactttctgtctcattgatctgtctaatgttgacagtggggtgtgaaagtctcccattattattgtgtgggagtctgagtctctttgtaggtcactaaggacttgctttatgaatctgggtgctcctgtattgggtgcatatatatttaggatagttagctcttcttgttgaattgatccctttaccattatgtaatggccttctttgtctcttttgatctttgttggtttaaagtctgttttatcagagaccaggattgcaacccctggctttttctgttttccatttgcttggtagatctttctccatccctttattttgagcctatgtgtgtctctgcacatgagatgggttttctgaatacagcacactgatgggtcttgactctttatccaatttgccagtctgtttcttttaattggagcatttagcccatttacattcaaagttaatatcgttatgtgtgaatttgatcctgtcattatgatgtcagctggctattttgctcgttagttgatgcagtttcttcctagcctcgatgttcgttacaatttggcatgtttttgcagtggctgctgccggttgttcctttccatgtttagtgcttccttcaggagctcttttagggcaggcctggtagtgacaaaatctctcagcatttgcttgtttgtaaagttttttatttctccttcacttatgaagcttagtttggctggatatgaaattctgggttgaaaattcttttctttaagaatgttgaattggcccccactctcttctggcttgtagagtttctgccaagagatcagctgttagtctgatgggcttccctttgtgggtaacccgacctttctctctggctgcccttaacgttttttccttcatttcaactttggtgaatctgacaattatgtgtcttggagttgctcttctcgaggagtatctttgtggcggtctctgtatttcctgaatttgaatgttggcctgccttgctaggttggggaagttctcctggataatatcctgcagagtgttttccaacttggttccattctccccatcactttcaggtacaccaatcagacatagatttggtcttttcacatagtcccatatttcttggaggctttgttcgtttctttttattcttttttctctaaacttctcgcttcatttcattcattttatcttccatcgctttcttccagttgatcgcatcggctactgaggcttctgcattcgtcacgtagttcttgtgccatggttttcagctccatcaggtcctttaaggacttctctgcattggttattctagttagccattcatctaattttttttcaaagtctttaacttctttgctattggttagaacttcctcctgtagctcagagtagtttgatcatctgaagccttcttctctcaactcgtcaaagtcattctccatccagctttgttccgttgctggtgaggagctgcgttcctttggaggaggagaggcactctgatttttagagtttccagtttttctgctctgttttttccccatctttgtggttttatctacctttggtctttgatgatggtgacgtacagatgggtttttggtgtggatgtccttcctgtttgttagttttccttctaacagacaggaccctcagctgcaggtctgttggagtttgctagaggtccaccccagaccctgtttgcctgggtatcagcagcggtggctgcagaacagcagatattggtgaactgcaaatgctgctgccgaatcgttcctctggaagttttgtctcagaggagtacccggccgtgtgaggtgtcagtccgcccctactggggggtgcctcccagttaggctactcgggggtcagggacccacttgaggaggcagtctgcccgttctcagatctcaatctgtgtgctgggagaaccactactctcttcaaagctgtcagacagggacatttaagtctgcagaggttactgctgtctttttgtttgtctgtgccctgcctgcagaagtggagcctacagaggcaggcaggcctccttgagctgtggtgggctccacccagtttgagcttccccgctgctttgtttacctaatcaattctcagcaatggcgggcgccccttccccagtctcactgccaccttgcaatttgatctcagactgctgtgctagcaatgagcgagactctatgggcgtaggaccctctgagccatgtgcgggatataatctcctcgtgtgccgtttttcaagcccattgggaaagcgcagtattagggtgggagtgacctgattttccaggtgccatctgtcacccatttctttgactaggaaagggaattccctgaccccttgcacttcccaggtgaggcaatgcctcgccctgctttggctcgcacacgatccgctgcacccactgtcctgcacccactgtctggcacaccccagtgagatgaagccggtacctcagtttgaaatgcagaaatcacccatcttctgcgttgctcacgctgggagctgtagaccggagctgttcctattcggccatcttggctcctcccccacccgccattatttttttggacattgtttcagctctgccgactttctcctctccttctaggattccagtgacacaaatgctaaatgttgtgctccacagatccctaaggctctgttcactttttcctctatttccttctgttattcagtttgcataatttctattatcctgtcttccaattaagtgattcctccctctgttccttctgttctgctgttgagcacaactactgagcttttattttggttattatatttgtcagttcaaaaacttctgtttggttcttctttacatcttctgtttcttttctgagagtttctatttctttgctaagtgtatttttttcattcatttcaagcattttcataattgcttattgaagtatattttcaatcatggctcttttaaattctctgccatttcgatgttggcattttagggtgatctttttacattcccttggatattttccaggttcttgatatgacaagtgattttagattgaaacctggaccttttcttatttttttctgagataatttattttatttaaaccttctatttagacttcctgtaacattgcttcatctggaagtggggacactgccttatatctgctagatggtggtagaaatctaagttcttcacttggcctccattgaaacccagtgagtcggaggctcttctttactgcttgatgggggtgggagttccctgtccccatgtgatgtccactggtgggctggcctcattgctgtttgtcagcagtgaaagtcctgactctgcagtaggcttactctgacacttccccagtggggagggggagggatgccccattactgtccaatgggaggtggaaatccaacctctccacatggtctccactgactccatgtgagtggggcaccttgttaccagccagcagagatgaagtcctggctgtcgacttggtgttctctgataccacccagcaagggtgttgggtgtctcattacaccttcatgagggtacatgtctgggtttcacacccatcctttgctggtgtaggtcaggtggggacacaatttttctgtgatgtttggctggagtatagcagttgtctgaaagttttctatcttgctaaactgctgtttttttttgatcttttgactagagggagcaggcttttgctggggctttttgtttgtttgtttgtactcattggtctatctgggctgttggcctctttgcctccaagtgtgggatatatgaaacaaaaacaactcatcaatatgttgttccttaggtcctggggtccttagccagtctgccttttctcacctttcagagtcttctcttttttaaaatctattttaataggtttctggggaacaggcagtatttggttatgtgaataagttatttaagtggtgacttctgagattttggtgcacccatcacctgagcagtgtaccctatacccaatgtgtagtcttttatttctcacccacctcccaccctttcccctgagtccccaacgtgtgtgtgtgtgtgtgtgtgtgtgtgtgtgtgtacacacattttctttatccactcactgattgatgggtatttgggctggttttgtatttttgcaattgcaaattgtgctgctataaacatgcatgtgcaagtttcttttttgtataatgacttcttttcctctgagtagatacccaggagtggcattgctggatcaaatggtagctctacttttagttcttgaaggaatctccacactgtttttcattgtgggtataccactttacattcccaccaacagtgtaaaatgtttacattctcaccacatccacaccaacattttttttttgaattttttgattatgttcattcttggaggagcgtggtggtattgcattgtggttttaatttgcatttctctgataattaatgatattgagcattctttcataggtttgttggccatttgtcaatcttattttgaaaattgtctattcatgtccttagcccacttttcgatgggattggttgttttgttcttgctgatttgtctggattcctgttgcccaatgtatagattatgaaaattttctcccattttatgggttgtctgtttactctactgattatttcttttgctgtgcaaaaggaagctttttagtttaattaagtcccatctatttatccttctttttgttgcacttacttctgggttcttggtcatgaagtctttgcctaagccaatgtctagaagagtttttccagtgttatcttctagaatttgtatggggtttcaggtcttcagagtcttcttatgtttgttttacatactctttccagaactgttcagctgcccttacagaagaatagggaagagtatgtctatggttagaaattttagataacattagctctctgaccacttttggtgaattttgacttaattttaacataatcttaatgaaaatcaatatagcatgattttagcatggtcttccttaaattactgggattagtttgtatttgtaaggacagaaatcatcctattttaaattagggaggtatactatttattactattattcatcaagtaatcattatttaacagaagaattaagttgtaattatgatgtacaggaaaaataagtgcattaaagcatacttcaaagacttacaattttagttctttttatatgccctttatactattgggtttttataatgaagttatagataacaaaattatatagccataaaatctaaaatgcttttcaaaatgaaattatttttctcaatggccatacattgaaaaaatccatagcttttttttgaaattaaaaaaacgttttcattaatacaatgaatatttagtaaaaacatactgtgggcgagacattgtgctagaaatataatgatgagcaaaacatacataggtcctgccttaatcagacttaaagtgttcttctacagtaaaatatcaaaataatgaaatgaaatcttctaggaaagtattttatatgtttttatgaatagtgctgctctggaaaattagaatattatctttcgagtgtattactccactactagatgcagaaaaattgacgtcttaagcagtggtatttattactaatgtttattgaaaataaattgaaaacaaaaattatatgatgaaatgtttcattggctatataatgggctatttccatcatttctgaaatatctcttggatttttagtattggtttagagtataaaagacagtgatggccaatgttggccgtggctattaatggtttatattagttgaaagctgtagaatcatccaagaactctattagcattagagtaacaatttaccaagacaattaccacatactggaaatttttgcagctctaattcagtattattaataatggataaaattgcatttttctcaggttgctgtgggcagcggggaattatttcaatgaatatttcagcacattattttaatcatttttccaccaaatccaagtgggcaatattttatacttcttaattcagcctactaagaaaccatggtcattaaattgtaaactatttgtagtgaggtctattccgtgatttacaacccttgttaaaaacagtgtaaaagaaagcaaactgtaccattactacggtgtaatttgatgttgcctttgttactaaactccacatgattaatgcttttagtagaaagaagaaagttttaaaaaataaaaagcagagctgagtggtataatacctgaaatatgagaatgttattattttaagtctttttcacttgtagaggaaatatatatatatatgtatatatatacacaaatacaagtgtaaaatataagtatctccaaaattatcttaatttttcaatgagaccaacaaaataacttcaattttatagaaaaatgtatttccagctatgcattgttattaatagggattactttttttccctctactcttagccaattgcatgatttctggcgtttggattactgggaagatgatcttcgtcgaaggagacgatttgttcgcaatgcatttggctccactcatgctgaagcattgctgaaagctgcaatagaatatggttagtaccaatgcttcttccacaaaaatacttctggatgtgaggtgactccttgtgtttgagaattccttctttttttttcgctagtatttaatgttctccatgtcttgagtcagaaatattttgttctgctttatccttcagcatcatttaggttactgttaatcaacccaatatttctcagattagatatatttttgtagccttcaacttatttttaagagctaaatggacttcacatagttagttattaactaacagtcctttcatatatcctaacacaagaataaaatcaatttctttctcggtgtctttcaaactttgatgaccaagacccatagtaaatactgtgatcctgtactcagacttagatattttatgtataaatttgtttctgtgtacatacttatatatactgcattaatatacatatacacatgtaatatatatacatatgtatactgtgagtatatgtttatgtatgcatatacatattgtatatattaaaaaagttttatttataacctctttatatgatattttgttttaatcccacctattcctttcagcttaataaaatagaatttaaaatcttgttataagctgccaatttaaatttccagtcctccaatgcactacaaatgaagtttgaaaaagatggtctcctacttacagtatcattaattatcacactacagtagaactataccctaaattgttctttataaactgtacaatcacaaataccaaaatatttttgtagtttaataaaaatgctgctactttagattgttttctgctaagaagtatcttaggaacatttggtctacttgcccatttttaaatgctgtaacaagttaaagtgtgatggggtatatcagaattttacaaaccacattcactaaggaaataccagtaatgaacactgtccatgtgtttgttatccacttttgttcttcaattacttgtattttattatattaattttcttttatttgggagtactaagtgagccatctgtttttaaaatttaaaaacagttgataaatagtattatatcaaatcatagtttatgtcatgtaaaaccattcatgttcttaatgaattgaacagggaagtaataaaaagacaaaatgtgtaaagcttttaaaatttcttttcccagtaagctatgaattgctataacttaataagcatcaaaatatcattaaaaatagataaggatttcatatgaaactgttatacctaagataaaagttatacagtaactttatatagtaaaagtaactatggaaaaaatatgctggaaaaaaattatagtttgtcttctttgaataactaaaaatagcacctaaggataatagccctctaaggatttgataccaactcaaaatgagttatcattatgatcttgtaggagagaatcttagaaatatctgcctacctagtagtggcatgctttataatatgatcttaaaattattaaaccttcatttcatttaaccaataatttagactttttcaccaattaatcctgaatttatctcatttgaaagtggaaacatataaagacaatttgtaacagagtttatactacagtgatatcattagtaatactgagttgccaaagctttaattgtacagaattcatattatattacattccacaatctacagattacttttaagcaaggctttttttagaaaaatgtttgtatttcttcttaaaagtgaatactttgtgtgtttaatttgtaaaataatttctaataaaccagtgtcaaagcctataagaaacaaaatttaaaatctttgaataaaatctttttcaaactgatagtcatattttaataaaatagtaactattgttaatgaacctaaagtaaaaaataataccgtaattttgaaataggtaagaggtgtgatactaaatattctttatatgtactatattttaaaatacagtatttatgaattttcaatctggatcataagcaacgttcagaacccattatctatccctcttgagttgtgttctgttataaaagaaaagaggagtatgtttttattatacctattaagaacaaagatgacacatctacacagtaaaatattcagggaatcgacatggtactattggagttactccatggtcattctaaggtcagggagtggaagactaaagagaactaaaacaattttatctccaaaaacaattatcctctaaccttcctcacagttcacaagtctatggactttaggactgagtggagagttgggagtaaatacagaggatgtagagaaggtgagtgggaagctctccctggagtgatctatacgtagaagtagagggaagaatcacaaattgacgagagaaatttagtattgtgccttcttcctacctcttaatgtgcactctaacctatatagaaaatatctcttcagaagaaataggaagtacatgtcaataattattacaaagcacttaatccagtaaatgttgaaaaacttaattcaaaacagattttgtactgccaaggacccaaaagataaggaaagactgagaaaatattccaaactggagaagaccaaaaaagataagatagattattacagcacatttgtttgtttgtttttgtttgtttgtttgttgtgacggaatttcactcttgttgcccaggctggagtgcaatggcgcgatctcagctcacttcaaccttcacctcctgggttcaagcgattcttctgctgggattacaggcgcctgccaccacacccggctaactcttttgaatttttagtagagacagggtttcactgtgttggccaggctggtctcgaactcctgacctcaggtgatccacccacctcggtctcccaaagtgctgggattacaggcgtgagccactgcgctcggccttacagcacatttttctagatgattgcagttggtaaaatttgactggggtccatgatctggatggcagtattgttatcaatgctaacttccagagttggagggttgatggtacttagacaggaatgttcttgttttgagaaatacaacggagtagttaggggtaatagggtgccatacctgcaacttctcaaaaagttttcaaaagattagtgataatggatatgtgcaggagtggggtggggggggcgtgtagatgtttgttaatattgggaaaacctggataaggataaaaatgggagttttgtactatatttgaaatgtttctgttagtttgaaattatttcagatattgtttaaattttatccctgcaagttgaattaaaagaaaaagcaatttaaaaaagtatagaataaatcatttatccactgtaaatgagcttagaaacctttttcttgtaatattaggtattagtgggtttgcagtaaaaaataaaaagaatctcatatacgttgctgaaacaatgtaaatgaggattgctggaaacaaatcctttgcaaaacattttgccaatgcacatcaagagtctcaaaaatgctgataatctttgacccaacaattccctatctaggaacttgacccaaggaaatgacttaaaagacaggggaaaaaaagctatttcaaattattcgccacagttttctttggaaaatctgaaaagcaatataatattgtgggaagactggtttcaaaaaaaaaaagaatggactcaaaaaaaagaaaacagatttcatatttttaaagaaagattttgtatatacaaattgccaggacgtccatgtaaaagttaaaaaaaaatagcctgacgtctgaatattccatctgccgttaaacatttaaatgtgtttaagtattttgaagtctggcattgtatagactaacatccaaatgacttaatgttttggagttgtatagatgtagattaagagtatattgatagcacaaacctgcaaattctgactaaactactagaataaattgaaattcaactgatctcttcctctgtgttaaataatgacactatttcaatttccctgttgttaaattctactgtgaaggccgggcgcagtggctcacgcctgtaatcccagcactttgggaggctgaggcgggtggatcacgaggtcaggagatcaagaccatcctggctaacatggtgaaaccctgtctctactaaaaatacaaaaaattagccaggcatggtggcgggcacctgtagtcccagctactcgggaggctgaggcaggagaatggcatgagcccgggagacggagcttgcagtgagcctagatcgcgccaatgcactccagcctgggcgacagggagactccgtctcaaaaaaaaaaaaaaaaaaaatctgctttgaaagttaagtgctaactgtgtagaatttctgctgaaaactttggtcaaaaaattttatattgatccacatggtagcaacaaaaaagattttaggtacaaaagaacattttatagatggaactttcagaatgtctagaagtatttgaattagttatcaaagttttcagaattttcaacatgttgtctacactgggagaacaagcttaaattacttagaaagaaaatttttacatgaccatcaaagcaatccctgggatttgaaccattgatttcgtcttatctattaatgtagtaagtatactgtagttcaagaatataagcctttattagtgtaatagaagtgaaactgattttgcagacttcatgttttaataaaaatatcttgagtcatttgattttttctaatatcctaaattcaactaaacattttaaattacagttgcattttcatgtgatgggaaggaacatttagccatcatttggatttcatgacattattttcaggcaatttatttggtgcctcaaatatattaataatatattggcaatgctttcttttaaatgagcaaacaatcagaattggatataatttcaaggaaataaaggaaaataattttatttcatatttactttgaaaagctttcccttcaatttcattattaaaacttggttgacctttttcagttggaaaatatcctttatactgatggagtttttcatgcttttttagtaatactaatgagttgaataatttatgaggttgtcatgtgcaaaagattttgtgtgatttgatatactttcagcctctggtgttggaatgtgattaatgaaaacctagaggcaggtaattttttccctgctggttagtgttctaattttgcgtgtatttaatgtgttatttaggtgttttctaatagtaaaatctcatacaagtgaaaatttaattgattaccatgaattttatggaccatagcaatggaacagtataaggaaaatattttaaaactcataaactcaccttctgatctgcagaattctttttcttttgagcaaatgagctaatagggaaatgattgaaaaaggagggttttgtatattgtttatatattaaaataaaacctagactagtcaaattctggtgcatttctagcatgtcaatattgtagttgtcgaagaatggtacaaaatcttaagtttgattgtctttgttgactgtcaattattatttaggcctctgttgccctttcataaaattacagtggaacaatgtttcatcaaaacctaagactgcaagcacctccatgtctgtgatcaaagacagcatcttaaataggtctgatcaggcatcgtagaagagagcagactgcttcagcctgaggaaaaaaaaaacatggagcaaaaatgacaaagttaatcagtcatttctttggcaataaataataagatatgctgagaactgcaaatgagaacattcttatgttcctcagagatgtgtctgcttaacacctgatttatctaagcttgtgaagccatcaagttatgaccttgatgaataaaaagcagctctgtaatgaatctggaattaaattagttttgatggtatatgcatggctactgtaatgtgctattttcagccatcaagaataagaaaggcagtgagaatagaaaaatactaagacagctatacaattgttgagaaagaagctatcaagtaatctgacttcatttttcaagactttatagttcttacaacatgtgagagagatgacttgattttgtaaaacctaataacctattggttgtattatgtagagactctagtaaacatcttcattattgttcattgataactccattttagttggtgtattattaattggatctccttatttgaaatgaaataggtaatctggttatggtttaaataatttattgaaagttaatgatgtaaatttttagaaagagagagagaaagacatgcaggaagtgtctgtcagctctttttggtgtcagtgtcatattttagtatcatagccttgtcttcaccctatggtttttacagtctcttaaaataatttcaatgggttatataaaggctaagttacaaaatattcttataaaatacatttgacagatattatgtagcattttcatattaataaatgttctaagaggccacttagttttctgttgaaggttcagattgtagattttaaacagactcagaggacttgtgtaactttattaatttaaaagcagttattgaataacttctacatactatgcacgtgctacctgctggatttggagactgagacaatcagtttcttccatctaacagcacatagtttactgtagtgattcccaacaggggcaggggtaggagtgcactgctggcatctaattggtagaaaccaggaatgctgcctaaaatatcctaccacatacaggagagctccccacaacaatgacaacagcaaaattccagcacgaaatatcaatagtaccgaagtttgaataaccctagtccagtggaaaggaataaagaaaataaacagttatcatagagggatgtagtagttcctaaaggggcacagggagagacagtgacttactgagtctggttggagtaggcttcgtacaagtaaaggcttatgaattgtctcaagacttgattatgaatttgccaggttatcggggagtaaaggcagaggtcataacagaaattaccatggcatggagacataaacgacccttactcctttgaatggccttaatatttggcatttgatgacaagtcacttcataaaggtttcagaaggtatttttattttagatgtctcatattcctagataaaacaaaaaccatttgaggataagatatatctaatgtaaatggcaagttaatgggtgcagcacaccaacatggcacatgtatacatatgtaacaaacctgcacgttgtgcacatgtatcctagaacttaaagtataataaaaaataaataaataattgaatttgcattttagaaaaaaaaagaatcagatcttctatcagttctatttggaacattcacattaatacaattctttgtgcttattactcagttgctatttttttatttaatttatacttgattgattttttttgtttttgtttttgagacggagtttcactcttgttgcccaggctggagtgcaatggtgcgatcttggctcactgcaaccgccacctcccaggttcaagcgattctcccacctcagcctcctgagtagctgagattacaggcatgcgccaccacgcgcagctaatttttgtatttttagtagagacagggtttcaccatgttggccaggctggtctcgaactcttgaccttaggtgatccacccgtcttggcctcccaaagtgctggggttacaggcatgagctaccatgcccagcccgataactgattaattttaaggtatacaaacagattttaaccacaccattcatcactttgggtaacaacattgaaggatggattttctataaactaggtctagaaggatggtatttccaaatcatttctgactgtcatggaactaatttagatcattgttcagaatcttgcttcttttagactaatttttggtaaagtgtacacacaatcacatttacaagtgattataatatacaattgtaatattttcatcaaagtatattaaaaatgttatgggagctcagtaaagagggtcgcctaactgaagaaatatattttagctggagtcgaaaggatgaatggaagtcttcccaagccaatgagtgggagagtggcattgtggaaaaagggagcacataatacaacataatgtattcaaggaatggaaaatggtactaaatgatggaacacaggatagtgtggggaaatggtatgaagatgaggctgaaacacagttgtggccctgctgtgaaggggattgtcgttaaacaatttttatttggaaaatgacaaaccatagaaattaggggacatgctaaataataagtgatagatagagctaaaactcaacccaaataccagtctcttactctacagtgtgttgtagtaaatacatttggaatttccttaactatgagggcattaccgaacatttccctgctgtaaagtttacctgctaatatttggttggcgcttacagcctatcgtctgtaaagatacatcagaacagatgaacttagtatcattcccaggatatgtattctatgccatttagaaaaacatttttaaatgttttggtgttttaaaaagtgcttttagataatctgtatcagcaccatcacttatgtatttcattttttaataattaaagagacttttaaaattttctcttccttccatgtctctgggccaattgtttgcctgtctcaaaaatctcctacccccattttccatcatctcacacttttaaagtgaattgtccacattggactttgtgatatacttaaaagaagacaccaagcctctcatggaaaaccagcccatatttattgtctccatttattttccttaaattgtctgtacaaacatgattttctccctcacatttttaaaattcttactataaattctccattgaaaattctaatctatagtaatctgatttctggttgttaatgctgtgtagagcaaaaccaccattcatttttggcataatgtaattaaaatacaatataaatgctaacttgcatgacctatcaaagcctatatgtttgggatatgccatatcccaaatgaaggccatgttgtcattaatgccaccttaattctttgacttcttgctggttccttcccctaccttcatgacccaggccaccttcacaaaaattgctgctccatcagtgatcaattagggaattgtcaggtttataaatttactaaatgtgccatggggataccaaaatcactaaatgattggattgagatcaaaaactgagaatattgtcttagtgcatatgctatctgcaagatggaaaaataaacttgtctcctatttgaaaatacatggaatggaaaaaggttaaaactctagtaaacaaggaatgctagatgtgaaaaaaaaaaaaaaaagaagacactgaggtaatgtcacttactgtgcaagaaagtctccccaccctgtcagcccactctcaagttgtccagttaatcttttttttcattctaatagttgccaaactttctaattcacattctgctgctcactagccatctacccgtattggtacatgatgcaggttcctttcctttgtgcctccctccctgcctccctcctttccttgctttctttcagaaaaacatatgctcattataggaaataccaacaaaagtgccaaaaaaatttgaagaagtcatccacataaagataactgtctttatcattttcatgtatttatttcatgttagtctttttctgtgtgtattttatcatagggaccaaacgctatgcaatgtactcatatagtcacaaagatgaatagtgcatcatctctgctctttatgatatttagagagttccaaaaagacgcaagttttctatatgttttattacgtttttttacaagtaaaatgtgccctgcgatttttagtataatgaaatctcattttaaataattaaaaatcttaacttcatggctaatcaaaatcctgtcgagtaatatcccgtctaaaatgtggagagagtctgcgtttaccgtcacgtatattcttaaaatatggtttatcaaattttctttagaaagcatagaaggcagttttctacgttgactccattaagaagattattaagttaacatttcatacttatatagtgcttcacttaaattcaataatattttcttgcacttttttaattgcatttctctgtttaaaaatactgtttatgaatttcccgtttgttggtctgctctaaaaaatattgcttacctatgaatattttgaattaggaataaatgaaattccgtttttgctgtcagaaccaaattgtaaaaatgaattgcatgactttgaaaatcagtatactctattagcaggcctgtcaatataaaaagtgcattccatttccacctcttgctctaataaccttttctctgttactctgaggcagttcacataatcagagtatattgtcagcttactggagttggggaagcatgaaatgaaaatcacgttagtattgatccaattcttttgcttgcaagtatccttgatgtccttttccagtgagcaataactgttggtgttaggtagccattttcttctcttctttcttaaattccaatcaattgtttacaagcataactaatctgaataaaaatttaacacttggaataatttccatgtgttaattcccagattgctaatgctgcacatttactataccactgaactgttttcccccagcttttcaaaacacagcctacctaaagacgtaatatttatatgtagtttaaaacaaaagtctgtacaagttcctttttggtaaaattacgtaagatgctgtactctgacttttatgtaatatagtcatgtgctaaaatggaccataagtgccatgaattactgatccacgtaaggaatagcatttttgaaccaagtttattataaatttgaagctggtgtcttgggtttttaattttatagtggtatagataatatctattttggattattcaatatattctctgtcaacaaaattaaattgaagtgggaatcatggttagatccaactcattcaaactaaaatatccacaactaagaaaggaggaattggatggttgaactatccagactttatatctgtatttattaaatttgcttagtaaatactcagatttttacctaaaatgtatttggaacaacaaatagaaagtctatttcatgtgtagaaatacttgctttcataaaataattttatattgataaagtgaggcttctgactcagtatcaggtataaaagattgagaaaatgcttgagatttctggtcattctttctaatttagtgtttttattcagtatcactaacagttttgccattgggatttttctattgaaagacctgttttcttctcctttttaaaaaaatgctattttataaagaagatgatttaattttttgtcattaatcttcgttagaaaagtgatctttcctattatcgtaatttgtttcttaaggaaggacgcacttaataaagtcaaacacaaaattaaaattggaatttagatgatttacaaagaaaaatatttacttattaggaaatgattgttacagtagactgttctagtgtgtatctattacttttatctcacagatacactaaggtaagcataaaatgttttcgaacaataggttcctcagtataagaaaaagcattctttcaggtttttttgaaatgttcaaaattgtaaacttcccagtaatagattgattcatacatattattgcacaagattgtgtcatcatatctattgtaattttctgagaggtatatttatcttaaatctttttccttttagtggaaattaaacagcaccatttagagttactaaaagcactggtctgaaaaggtatttgttgctcagacttaagttttaatgagaaaaagtaatctttaaaatttctcaaagtattcatgtaattaatgcactttaaaaagtatttaggtttggaaatgaattgcaacattttattctactaaaagagtggtagacttcgtcaaaatacattgaacaagctaaaaaaatattgagaaatggcgtataatgaaaagaatttcttctttgaaaaagaatgccatcctgttcaacagattcctgaatgtttagaaacagaattacctgataatacatttaggtaaaaataaaattagaccagatttctattctgccagtgtcctcccaaagatctttttccaaagatgaaaagaagcctatattaaatgcattatctcttcttgagaaagcagttcttttccttcaaatatccaagatactaaacatatttatataattaaatatctgtatgcaaaatcagaagtacatgtcaaatacattggtgctttatgtaattttatttaatatctttaaatgaataaaatagttatggaaaacctacattacatttaaaatgtaagctatttatactacattcaatttccaaagtacttcctaacacctgtacttcatgctatcattcctgtcttcagggagcatccaatctagtggaggagctgaaggctcattcacattttaatgaatacgaacactgttataacagcatggtggaaggaagaatagtaactccaactgaaggaaaggaaactatcacttgttgaatacctgatgttggataggcattgtgccaagaccatagactcatgctttatcttgagttttttaatcctcagataagccagctttttttccccctctttacgtaaatcttatgcaacactattataagcaataaagcattaactatgttctttttcagttttaattatgtattcagtatactttttatcctcttgttttatttattttatcaaaattttaataaacatttttgaaagcttactatgtaaataatctccacacatttccattgtctcattttaactttgcaataatcctgtgaaagaaaatgtggaaaatacttaatattactcttctacaaatttggaaactgaaattaagagattggtctgaatttttttaatgtttctaatggatattagtggggaacaataacttatgaatggcaaatcaaatagtccaactctcccacttatgaggaaactgtaaagtacatgaaaagtaacttaactaatgtgcatgtaaaatgactaatatgtgaagtgtgtttatgtgttttcatttactcaacaaacatttgttaccattttgacatgtgaaattaaagtccagtagagaatccctaaaataaaaacactccaaaattgaacaatgataagatatgatgacttaattctaagatataaatgtttatatatatatatatatatatatatatatatatatgtatatatatatattatatttgaagttctagggtacatgtgcacagcgtgcaggtttgttacatatgtatacatgtgccatgttggtgtgctgcacccattaactggtcatttacattaggtatatctcctaatgctatccctcccccctctccccaccccacaacaggccccagtgtgtgatgttccccttcctgtgtccaagtgttctcattgttcaattcccacctatgagtgagaacatgtggtgtttggttttttgtccttacgatagtttgctgagaatgatggtttccggcttcatccatgtccctacaaaggacatgaactcatccttttttatggctgcatagtattccatggtgtatatgtgccacattttcttaatccagtctatcattgatggacatttgggttggttccaagtctttgctattgtgtatagtgccacaataaacatacgtgtgcatgtgtctttatagcagcatgatttataatcctttgggtatatacccagtaatgggatggctgggtcaaatggtatttctagttctagatccctgaggaattgcctcactgtcttccacaatggttgaactagtttacagtcccaccaacagtgtaaaagtgttcctatttctccacatcctctccagcacctgttgtttctaagatataaatgttatacagagatggaaataatcaacctgactgaatcctgaaggaataggcatgtaagagattttatgtaaaagaaattacataggtcggacttaaagatttgagacaatgtggcatgtatgcagacaaaaacattcagcttttagagaatatgaggtgcaaagaggccaaatcagtaaaatagtgaggttaaataagcagaagctagatcatgagctttaaaccatatgtttaaatggtacaaataaaataacattgaaaatgtattattccattgttgatatacattagatagatacacatatatacctatatatctatataaatatacctatatatataacttttcaataaatgaaaaccccattgttccacagtcaatataaataataatagcataagctggtgaaaagctgagtctacattaaaactggcttattatgtggttatatctcttttctttgtgtgttagccacacatatgatttatagctaacctattgttgtgaattacttttttctttattagtatagatgttttagagttgattataggaggatttcttaaacagaaataaaatactgtatttttcttacattaattgtttatatttatcaatagaaaagaacataaagggcacatgaactaatttctttgccttgatcctgtggccattccaggtagacatattctttgatgtcgttaggaggagttcatgtctccagtttgtcatttctgtgttttaacttatgcttatttaaaataacaacaaaactttaaaatggaaatttaaactatatcaataagagtaacaataatactggaatatagtaacaatactagaaacattttagttctgctgttacttcacctttaaaatataccttttttcacatggattcttggttattaatagaaattttatgaaaaaggaactttagatttctgcaatgcaatattctgtattacataacattttcatatacagagctttatatatatatatatttactaagaagtcagtctatggagtgctttcatgggttatttctcacatgatgtagaaaataacataagtgcggttttggatttagcttccttgagctataattcagtggcattttttctcctgaaacttttaaattttgtggtattttaatgttttcataggcaatagcatatatgtctatcctacccagctttacacataatatacattttcagatccaaggcgttctggtagtttgtggtattcgcttgttaatttcttgatgaatggctaaagaggccaaaaagtgcactcagtccaacatgtcttctgaagatagatgatctcaaataaattctcttcccaatcagattttgatttgttgggtgttaaaccaattctttctaaggacagtgtttacaagccttgtaatgagacagccctttgagaccttccctctttttgcctgtaattttgatgaatgaaactctaattcataaaggatattgtgattgaaaagcacctttagatctcatacactttaatttagataaatgtttggtgcagtaccatgaaatcaggaagtttgctgagctgcaaactgataacacttcaacaaggatgataagcttagtgtgttgatatggattagtttactatatatcttttaaagtcatgattgttttactgctttaaaaccagaggggataaaattgaaagcttgatatacatttcagagctcacctttcttctactacattttcttctttggtaaatttttattttggtaatacaaaagtaacataaagcttttttactgacaaagattacccatgatttttatataaggaaaaacttgctttattagattactcacacttaaaggcttttttgactttattgtaaaaaaccaagttacttttcatgtaaatacatatattctccggcttgccccaaactaaaggcaaatcactgagattctgagataccctgggaacttcagactttgaaatatgcaggggtaactgtaatgtctgagtttatacatttattcaggatttatgagggcttgctctgtgctaggcagtgtgctaagtactgagaataccaagacaaaaacatgtttccagtcatgaaggaacttggaggcttttgtggagttaaataagcaagcagttacaatatctataaattatgcagtagcagggtttacgaggtatggtggaagcataagggaaagagtacacaagtgctcttaagaaatcagagaagggaatggggtggtggggtgaacttgaacttcagttcagcacatgtttgtggcagaactgctgggcaccaggcactgaagctacagaaatgggactgaggacagacacatagtaggtaacacctatacagtgcagttgaattatgtgtaagctgttaacgtgcagtagggtttgttaggaaaggcaactgaaggaagtgagtttttaagggcaagtagcaattagccaggccaaggaggaaaggtaggaacataccctgcagagggaataacattagcatgggtaaagaggtatgtgaaagcatgacatattttggaagctataagtggtccaatattgctgaggaaggtgtggtgaaaacacagaactggtaatgagaggataaaaggccttggtaagccatgctaagaagtttggattttatcctccagtctaagtcttgcattaggtgttcttgactgggaggagttaatgaataattttaataggaaaatgtcctcaatttatttgtgttttataaaaatcactctgacaaaagtatggaaggcggtgtgagtcaggcagctgttgacaccctctagaccaaaaacagtgatggcctgaactagggcagtggcagtcaccatgcaggatgaattcctaggtttctgctaaagtacatggttggccaaaataggaggaggagaaggagcaagagacaattagctcagtaagagaaatgttcagttaatagtattcaggcaaagtccagaaatatagctgagaagacctcaggagagatttctgaattattaatcattgggtttccctcttttgttctcaaatgatgcaagctctatatttctgtttgccaagaagcaaacaagttataaagatagctaccctcagaagattactcttgggctggctttatatcaccaaaaatcaaatagaattaagataaggttctgaagcattcagtgatctatccctaatcttttattccagaaataataattatctatgggccagtggaagaaaaatacacatggaacccatttaattcccctcccctccaatgtagcattgatttgtcataatactatttgtctctgaagtatttatcaaaatatatgtctaacaatctatttatacatttaaggtacgcattaaccatgtgctctaaatgtggttatgtagtaggagctaggatgacagactatacctcttagccagtgatactctgtaatggtattgtgatgtgactatgttcctcaacatgtgtttttactctggcagccttttgagtccattttttcatattttagcaaacagaattagcctatattcactgagaaaaagaagtatacaaactgcaaagagaaaaaggaaaaaagccaactattttacaatgcaagttgtatgacagccagatgtacttgcaagaaaatggttgaggctgggcacagtggctcatgcgtataatcccagcactttggaaggccaaggtgggaggatcgcttgagctcaggagttcaagcccagcctgagaatatagtaagagcccatccctacaaaaaaaaaaaaataacaataaaaaaaatagccaggcattgtggtatacatctgtggtcccacctactcaggaagctgaggcagaatgattgcttgagcctgggaggtcgatgctgcagtgagctgtgatcatgccactgtactccagcctgggtgacagaatgagaccctgtctcaaacaacaacaacaaaatggttgagcaaacatcaataggcagtaatggactgttggaagttctatggtctgggcctgggtgaattgaccaaaagtattgtacactttcgaccaaaggcatgacatcatttggagagccattgtttatggtccgacaccataatgtcccctaaaaatataatacaacaccatataggactgatttataaggctcccatttccaggaatatatccaccaccccaaatgagatatgaagacattttcctagttaatgctgctccttgaaggctatatcctaatacagaacacagtatatgacaatgctttcttctaaattgaatttcagcttcaagtgatatagaagtatttcatgtctgtggtgtttgtgtgggtgtaggtggtgtatgcatgtataaaatttgctttcagttcagataattttatattaattgacacctgccaaagcagatgtttgaatgtaaatatgaaaacatttattaagcagtcaaattcttgagggattcagatgcattcgtttctaacttaacgcattaatgccaggtcaaatcttgcaatatttccagtatttcagtttttctgcttattttcatgtgttttggttttggctttttgtgtttttgtttgtttgtttgttgagagggagtctcactctgtcgcccaggctggagtgcagtggcgcgatctcggctcactgcaagctccgcctcccgggttcacgccattctcctgcctgggcctcccgggtagctgggaccacaggcttttggctccacgcccgtctaattttttgcgtttttagtagagacggggtttcaccgtgttaaccaggatggtctcatctcctgacctcgtgatccgcccacctcggcctcccaaagtgctgggattacaggcgtgagccactgcgcccaaccagctttttgtgttattatatatagcaaaataaggctatcatttcagaaaaaccagtatttatttcactaattgctaaagaaatagctattgtgaagaagcttttatgtctccatcatttctaactccgcctttctgtaactttccaatgatcatttttcccctcacatgtgaatggtttctcgtttgctgcatacttatccactttcaaaaatgatcttctaattagctaattagcaattgattagctaattaagacaaagtataattatgtaaaatagtgtgattttaagaaaataagtttggggtgaagtacagactttttgtgcaacatgcactgatcttagagccctaagacatggatcttcgagtccttagacatggtagagttcgtttctctaccactagcaactgctaggttcctccaaaatgcatgtagcttcctctgcctgtttcctcatctttaaaataagggtagatcattacagctccgcacaccccatgtttctcacagaaaaccaaacaagataaagaaggttaaaatgttctgtaattgtaaagtaatatgtaaatgcagcatataatttaataaagcaatcaattatttataatacctactataagcagaaacaatcataataacctaaatgattatatttttgttgtgattaggcacggaagaagatgtagtaaagtcaaagaaaacattcagaagtcaagcaatagtgaaccaaaatgcagagacagaacttatgctggaaggagacgatgatgcagtcagtctgctacaggagaaagaaattgacaaccttgcaggtaaattttaaaatatatttttcctatttgttgtaaataaacacaaagctactgaattcaaaatctgtctcctagtaaataaatgtgtgccaatggttgtaacaatgctcaatcacatgaatgttaaaactctactttatctcatttctaatattgaagagagaaccccaaagaaatgtgtattttattggcaataaatgaatatcatcaaatttctaggtaatgaagagcaattttttatatagaaggaataatacacagtatcagttattcacatcttacggcctatattataattgggaggtgggacagaatgacagtttcattgatttacgtgtatctccaacatgctaagagccaaggtccttttcccaggtgccaattgaatttgccatttcctcccatttgtcactctaaagaatgtctctctccactcctgttttgttctgtagcctcatattgctaagccactagcagatattctttcccctaccacctcagttttaccttgtcatgatatatgtctgagatcaattctggatgtgattctacagtgagcagatggggtatagatatcttagtgtattcacccacaaccttttttgggttttaagccactttgagaatctgatgaaagcaaatggcttcatgaagaggcacatacaattctgtacacaatgtcatagtggtcactgacctccagaaaccagtccatggaatcatatcctcaacctcaccttaaaaatgcctgcttcagagtctcaaaaagtagctgagtcttagttctatacttgcagcccacacaaggttgaggtggcaggtggcaatagagaggtggacttatatttataattcttgatacaacataacacttgttgcaaggaacatactgaaaattatctggcatggctttatgaaagtctctagtgatttctttctactggttagagagttctcttttcatcttcaaagagatgttactgttaattataaactggagatagcacattattctcccttttctagattaagaaagaaaatatttaataagtttattctaatgctagttcctagatatttctatattattcacatttctgtattataaaaactattttttcgatttaaatgtactcttaagtctgtgaccaaatgtttgcctcaaattcttaagtaaatgttcaagttttgctttcgttgtttttgtggtttgttttagtagctcagagattttatatgaggccatttggaaatttaagctaatgaaggtcattgattctgtttgcccacagatgtgttttcttttctgctggtctcattcttcatcttaaagaatacagaaaattcacaaatgttatttctgacccttttagattatgtgttgtctttcctattcatatatgctagcagagatgtttaataattgtacagttcaaattagactccctggtcctttgttcctactgaagataattaattagttagtatagatttgcatagtcccttaaagtttattataagactgcccagtaatgccagtggcacaattcaacaaagactaataacctttttatatttctcttctttaatggtagctaattattaatattaatttatttttataagaaaacatcccccaaaaaagttaagttcaaacacctaaagaacagtgaaaatatgcttgaaataaactttttaaaatcaaattatatggctcctgaccaattcactgaatcaagactcctctaatttctgtcttttaatggatttgtcattgagcatacctgttcctatccataatatacctggtcctaactcatactcttctagcgggatccttgtgtgttacagctgtcctaaagtattgatcctctgcctactctgtagagttcattttaaaaacagcagtctacaaatatactctgaaccttgaatacagtggaaaagaagtaagggatgggtgttttatgaagggccacagaaatatgctgcataggttataagaatagatttattttgtaaatgctgaagcctattaatctagactaacataatagttacaatgttacataaaattcatttttagaactttgttacaagccagaattcttaggtttaagaaatcagctattggttaaagatgcagattacatcaatacgtaactgtttttgccctaagcaattattgtccaaatcatggttatctctgttgcagaaattaaaatttgtttaataataatgtctgtcttactcataacatgtcattctaagtagcctgacagagctgtactgcctaaagaaaatgtcacccttacaggagacttaaattcaaattaaaacccaggccaggagtggttgctcacacctgtaatcccatcactttgggaggccgaggtaggcagatcacaaggtcaggagatgaagaccatcctggctaacatggtgaaaccccgtctctactaaaaatacaaaaaattagccaggcatggtggcgggcacctgtagtcccagctactcgggaggctgaggcaggagaatggcatgaacccgggaggcagagctcgcagtgagccaagatcgcaccactgcactccagcctgggcgacagaatgagactccgtctcaacaaaataaataaaaaataaataaaaataaaaaataaaaaaacaggaaatcctaaaatcggtgtacaatattaatataatcttatatttatttgctatctcagaaatattatataaagtaaaaagtgcctatttcaatctctgagataaaaatcacaggtttatcttttcatgacaacttaatgaaatggcttgcatattattagtatgagaaatgtactttcaaatatataaaagtaattagagttcttagattttagaatatatatgaaagaatacatcatttttataattgtaaaggtaaacctaaacctgctgattagcatactacattttcctgttatttacaaaaccccgttttgctgacataggcatagagataagcagatatgcagtataatttgccaatatgtaataagttaaattcaaatagaagaaagtatgctaattagtacagaaaacttagagaaagtactaatttagttaagattaattctgttcttattttaattcaaaagatagatcaatttctgtttataaaaaaaaaaaaaagaagaagagaaagaagaatatctggcatgaagtactaggagccagacatcaaaaccagcttttttcgacatataaatgatgctgctattatagatttaacattttctgtaaaaggaaaatctgtattttctgcctgttgagaactgtttaatagcagttactcttcagtacatttacattttcatgtttttaaaactattttccttatagctgaaaatattgacaaatggatatggtgagcttctctaaataaaaaagagttcggcttagggttagggttagtgttcagacagctttgtgtgcagtaacccatttaatctaaacaacaacccaataaggtaaaaattattaccaccaattttggaaataaagataaagaggtcaagagattaagtaacttgcctaaggttaagaagtaggcaaaataatatatttccttgcaaatacatagtatatggtttgaactaaaatataccaaatagtacatttaaatgtgtgtatgtgagtgtgtttgtaggtatatatcattaaagactcttctaaaatgatgtgaaaatgacatcttctgtttataactcaatttttacactggttccattacattagaagtatatgaatatgtataataattaattttagttttgcttatagatagtctatgtgtggtccaaatcaatctggtaagttaaaaactatgataaatagaatgcttttagtacaattttacttaatgttggccttttcttatgtttcctccattttgtctggagttttctagttttaataaagataaaatgttccacaaaattctatagctttaaatgtcatacaattttatgtttcacttttagttccctttcttcccaagctgttcgtctcaagaggcaagttaaatgtgtgtgactactaattacccaatttattatgtattgtagcaaatggctaatatgattataatatagaagtatgccaatcaataaagtaattattatattaataaaacctaacttaatttactttaattgcatttttagtttgtagtgattcaccaaagtgaattagtacctaaatcccatatgtgactaaagatttcaatttactaattttattttttactgaaaacattgagattggtataattcaatgaattttaatataaaatcttgattacctattttaatttgaaatttagcaagttgtttcttcaaataactattgagtaactgaaattcaagattaactcaaatttatataaattggtaagtgaaggatttaattaaattgaaaaaatggcatcccaccaatgaaacgtatttcatttcttttagaatggtagttctgtcacatatgctgagtgataatagaaatattttacatagtgtaattggaatgtatataggttccttattatttcttccaaaagttagtaattttactaatttagggaattgtgagttaatgataatgatggttctttatgctttgttaacagttctgtaaattgtaataattttttttgtttgcatatatatttgctgttagcaataacaacatacgtatattgttattagtttatatatatatagatatatagatatagatatatatgtttttattaccaacagtccacccatgttaatgtctactaacttaaaaatttcacaggcccaaactaatgtccacacttcttcacctgcaatatccttcctatttctctgttccactccctctcccatctcctcctgttaaaaaccctacccatttttaagacccatttaaaacacttatgaaatattcactggccagtcatatcatctccataatattttgtgttagcatttttttttggaaatagcattattgagatgtaattcacatatcatataattgacctgtttacagtgtacaatttagtgattttttggtatattcattcacagagttatgcaactgttaccgaaatcaattttaaaatatttcattactccagatagaaaccttgttatcatttgcctttcttcaccaattttcctgttccctctttcgcaatcctggacaaccgctaatctactttctgtctctatagatttgcttattctggacattgcatacaaatggaatcatagatagactttagtgtctgccttctttcacttagcatggtgtcatcaagccctttccatattttgacatgtagtccctttttttgttttttgagatagagtccctttccatcacccaggctggactgcagtggcgagatctcggttcactgcaagctctgcctcccgggttcacgccattctcctgcctcagcctcccgagtagctgggaccacaggcacccgccaccacgcccagctaattttttgtatctccagcagagatggggtttcaccgtgttagccgtatggtctcaatctcctgacctcgtgatccgcccaccttggcttcccaaagtgctgggatcacaggcgtgagccaccgcgcccagccgcatgtagtcctttttatggcagttattccattgtatggatacaccacattttatttatcagttcattagttgatggacattcaagttgtttccaccttttcactactatgaataattctgctgtgaacattttacaaaatttcatgtggacatatgttttcatttatcttaggtatattcttaggaggggaattggtgggtcaaataataactccacgtttaacttttagactatttaccgaagaggctgcaccattttgaattctcatcagcggcatgtgagggtttcaatttctccatatcctctccaagacatgttattatctgtcttcctttattatagccgccccaccacattttgattgtatcattcttaagacacataccacataaagccttgcattgtagctgttcttccatgttttctctgtccttttagactagatcgcttaaagacagcattcatatactgtgtagctttgaaccatgaagaaatctcctaacgcaattatttgccctcaaaggttcccacttaaaaatgttatgtaggtaaactggaaagctgagataattattgagttagtttatatcaaaagacaaaacaaaacttacgagctgttgaaataaatatttgggggctcaaattatcagactatctgctcatactaactgaattattcaaataatttcaatagctcataataagttttgttttgtcttttgttttttggtataacttaattataccaaaagctgaatttcaattcagctcatcacttgaattttccaggataggaacagctaaagttaagctaatctttattgcatttccacttctggtaaacgtgtcattttaactaaatgtctctgtaagttccaatttataaggtcaaaataccgcacctactgttactgtaaaaaaaatttagcaaatagaaaagctgttctatatccaatggattgtaatgctactttgatattttttaagtaattagtacagggagatagcaacacaaggaagaagtattcaaatgtaagtgttggattttttttaatttgggtttttcataatggtaagtttatatttctttaccaccgcccccccccccccacacacacacacacacacacttaccaagttaagaatccaaaattcagaaaagtaattatgtaaattaagaatgagaaaaatacagaaggaggagatctactaaaaggctctctgaagtgccagtcatctccttcatgacccactttgttgcccatgacacttcccagttgtaccttccctgatttttagagggcaatatattttcaagctgtttttcttcttgtaaactggttaggttgtatacatattccatagctattgttctactagttcaaaacaaaatcaggtatccagtggtgaaaacagggctggtaggtggaagagggggcattatgtagaatttttcttaaggctgaccatttctgccttcctaaatgtctttttgaatgcattcacttgctcatttacttaaccattaacatcttttgaatatctactaaatatatagaacattggtactcagattgtgatagaaaaaaaaaaaagtcctcaagagaattagctctgctaccactacctctgggtaactcaaataaccaggaagttatggcagataatgtatcttccctaagaaatgaaagtagacagttgaaataatcagcttggcagttagaccttcagtgtcctaacttcaaatatccagataccacaggcaaagttgtttatatataaattgaatgttttctacaaactgagctagatatgagaataaaacaaaaatgtagagcatgtgggaagacgaaagaattcaagattctggggaaacataattaaaataaactacagaattctaaaagctaagagtttgtctaagaatatgttctttaaaaaagaataatagtataagccagtggcacagaaaattttgttgtaactgttgactggaatacttactatgggagagagcatgttcagtgcagatagactcaaatccatctgcttaagcctaactctgtgcattgcaattctgatatggtgaatgtaacattctgtctccaacaaaactagtattttttaaagattcctccatatttagttttatttcatttttagttacagagtctaactagaagttattcaacctgatacttgtatttagggggaaaatatctcttaaacattctggattctctaaaatgcgttttgctcagaattttccccgtattttttaaacccatgtgtattttaagggaaatttaatccatatgtccctgactcactcacacttaactcatcaaaatgttgtttagtgaaagctatttgatgttcaaaaagccttatgagtctttatgagtcttttttctctctttgaatgaggaagttgctttgccagtcataaatagtatacccaaaggattcacattcagcttcaaacacagaattcacaaagctcttagagacaacattaatacatgcctatttcttataaaagctaaagtatttaaatttctaacttaatttttatatcagttaaggtgttataaaaataaataaaagcttcatcttgaatattgagcctctttgcctcttttcattattttcaaaaagtctacaggtccttttagaatgtgcaaacattttactgtaatccatatttatttccataaacatatgtccccttcaaccatgattccatcatctatgaaacactataaggtactcttaattgtaacaacatccttgataaccaaactgtgtaaattaaaaatataataaaaagacacaattcaaccatgcttattagacattgtcttagttcattttctgttgtttataacaggatacctgaaactggacaacttataagaaaagaaacttattttatacagtcatggagactgagaagtccaaggtcaaagggctgcatgtggtgagggccttcttgctggtagggactctctgcagagtcctgaggccgtacccggcatcacatgtgaggggctgagggaactcacatgctatctcaggtctctctttttcttcttataaagtcaccagttctactcccatgataacccattaattcattaatccacaaatggattaattcactcacaaggacagggccctaatgacccagtcacctcttaaaggcaccacttctcaatactgccacattgagggttaaatttcaacctgagttttggaggggacaaacaaacatatttacacaacagtaggcatcaaccataaatcatatataatttgcattttttgttaattttaagaataaaagccaccctttgttatggtcaggtgtttcacaaaccgtactcataagatctgttctttcttaatacagtgtaatagttgaaacccattttgattttctacttttttctctgtatggagaatttatcataaactaattcctctacaaatttatagtcatactgtctaccaatctggagaatggggcaataaataactaacttaccaggaaaccatatttttctatatggaggtgactaagctttcatggttgtttttaagcatgtgaatgaggatattgatcacctactgaaaatatgtgggtcatcttgttagatcacatttgagggaaaatgcaagataacaaaacaattttcctagtatcaaattatggatgttagcaacttggaaaggaggaagagtgagctcttcattatcttgtcactgccatacctaagagtgtcctggtcctctccctgaaagactttgccgcttactcaaacataaagttaaaaagagattttgccactacagttagaatagtgctatacagaaggatcaataagtctttctgcatactgaaaatattttgtttaattagtttatttccatggcttgatgttgcagagccagaatagcagctatagaaatacttaaacaattagccctaaggacaagtatttacatggcaattaatttacaaatagctagtccagtagaatatgttctatcagttcaagtcatcagtccaataaaaacaagtcaattgttttctcttagaatagaatctgattagaatagaaaatgtcaagattcacacaaagtagggacaagacctggaaggacctgttggacccttattctctgatgctagatcgaaacttcactcgggtgaatgtggttgtcccaccaaaacaaatataagtatcggatatcaactctatgtaagacataatggtgagtgcttagagtaaaaagacacatatgatcaaaattctgccctccaggaagttatagaggagaagagataatgaaaaaaatagttaacctagatatagaaaggaaaccattctaacagaaaacacgatcctagaataacatggattctggaaagcctttattagaatgggtatttcctttcttgagtcttgaaaaataagttaaacatttagagagttgttgcagatggcgggaaatgtatactaaaacattaacttctgtgtgaaactacagtagttctaaattacttaggtagaaagcatgagtcagggagtctctgaagttgagactgacaagcgcttggggagggagctttatgtgccttaaggaaccttgtttttatcctgaaggccactgtgagactgtgaaagattttaagtatgacagtgatgaatttttttaaaaaaatcactctggcccttgtgtagaatatgcttttaggatgcccagacttgaggtaagagcttgacaggaggctgttttccaaagcagcagtgatgagagcctcaagtaaattggcagcaggcaggagaaaggagaatgggacagctaccaaaaagaaaaaaaattagaaggtaatttgtggaggactgtaataactgactagtgcagggagtaagaatgaggggaatcaggcctgagaggagaggtggtctagaagctattaactgtgtgtgggaatgtgcagatgcaaggtcttctgtgggtgggagatgaagatgcgtgatctgttgggcctccaaaattttcaaaagaatagaagtttgaaatttgagagccaagttgggcatggagttcataatggaaaccagtgagatcacctaaggaaagtaagaaaataaagagagaagtagtaggccaaaatcagatgccctgtggcacaaggtttaaagggcagccaatgaaggagagcccataataggataccaagcaggaagtaaagtagtaagagaaaaggaaagaatcctatgcttacgagtcaggaactctggctcagcatttttcaaactaatgctccttgtaacacaggtcttttgaaagatgctaatgagaaaaaagaaactctatagttaaatatgtttggaaaattgtgagtttaaaaataagttgcaggccaggtgcggtggctcatgcctataatcccagcacttttggagggtgaggcgggaggatcgcttaagctcaggagttcgagatcagcctgggcaacatggtgaaaccccatccgtacgaaaaaatttaaaaaattagccaggtgtggtggtgcgagtctgtggtcccaagtactcaggaggctgatgtgggaggatcccttgagactgggaggcagaggttactgtgtgatggcgccactgcactccagcctgggtgacacagtgagactccgtcgcaaaaaaaaacaaaccagaaaaagttgcagactttttaaattgatggactttttcaagcctttaacttactaattaatgagtatttcccaaacatcttggcctaagtagaggttggactgaaactaaaggagagaataggagtgaggaactaagaaatggaaactcatgtctagagcttaacaaagaagggaagaaaggagatagaaataagagagcagagggggcaggggagggtaggactagtagcacagatagagggggtaactacctcaaacaagaggaaagatatatttccagaaactgctgaaaaacagtttaggataaatgcagacagagacagttaaggataaatgcagacagagacagttagggataaatgcagatgtagaaaaatctgtagatagaggaagacaaatgaaaaaaatttaatttttttccaaaatatgaattcttcatttattatataatcaggatgaacaaatatataggtgaacttttctagaaaaaaaaatccgtatatttaaccatcttctcgggagaatgtgtgacccagaaaaagggtaaaccccagtgctctgcactataatttctgagctctaatctttgattccttaacctacaaagtctgacattcaagtatatgtatgatttttccgtttcatctcacactgctttcccttacacatcctcatctctggccaaacttatttactgctcatttacacctacaactgtgtttttgtccaaactattcccccttgctcacaatgctctcgaagaccacaacttgtccaaatttctacccatccatcacagctcactacagatgtcactgccatcattctatcccaactgctcacttccccaccaaaaataggccggaaatcatgattgttctgtgaatgtccagaatttttttctgtccctttcttgataggaggcagcgtatataacaaataccctgactttcgaatcagatcaccaattttgaatcctatctctcatttactagttgtatgacctctaaattactccaacccagagtctcattttcttatctgtaaaatggagatgatagtagtgctatcacacagggatgttaagagaaataaatcacataaagtgccttacacagttcttagtttaaccctttcttccttatgtcataattattcttgtgtattctttaccttatactataagctctttgtgggtaaaatgtatgtcttatacactgctgtattctctccttatatgcaaaaacaatatactactcattaattttcgttgactacgtgaatgaatgaatgaatgctgaattaaatatgtctctacacatttaattacaaagagcaagcaagttatacactaggaaaaatacgatagtcataaaattatgccatttaaaaccataatagtatgcatgtaatataactagaatgatcaattacattataactctcattggttttcagtatatttttaaatttatattttctctaaaatacagttatcttttatatttataaagaaaaatttgaaatcaatttcagaaaaacataaaagatgtaatatattaatttaagtgggcttttactatgacatataaatgcaacactggtatatatcattttctatattcaattccacaaacacagattgcatactatatgacagatactgtaataggtgaacaagataataacccctgtcttcaattagcttgtgccaaatgggagaaacagacttttaaacacatatatttaatatattttaagtgccataaagatatggctaggaaactatggaaatataaaggcaagctacttaatccaacctaggggtgcaaagatttaaatcatatcctctggtttattcactcctctagtctagtagaaatttactcttcccgatcattaaatgatatcccagtgccgtaaaagagtcaatactcttccagaaggtgaaaaatgtattccatatgttgaactaaatgtaatataactggaaacagaaatctcagctggctcacttattaaatcaaaaggcagagcaaattttcacactgaacattgaaactatcactgttgtttagtactttttgtattagaaaataactccgtgctattttacttatagtatatatgctttgtaagctttttcttctaggaaatcacacattgcctttgcagaaaatgcagcagttttttttttttcttttttggttccttgtaacataaagaattacctgctctacaataaattggtaaacataaatagtaggttaaagttagagcatataagagtctttctcagtactttttaaaattatgtattataaatacattaaggtgggattttagataatagtgtaaaaatagatgatctactatgatgaacaaataatatgctaaatttcagtattcagttgctcatataagagggctccattccttccatgtctgttttagactgtgctaagttgagtttttcagatgtaggtttactctcatctcaaaacacctaatatgtgttcttcatctgtctcattttatacaataataatctaaggaaactatgatctgtggggataattagttattgttaatcttagtgttaaggatagattatgctcaagaagtcacctagcagcatcaagaggccaattcctgaaaacagtgagcttttgtgtaaaatttgagtttatagaatatttataatggatagtttaggggagagtacattgtgtctttgtgaatatgttggggaggaagtagtactgaagtttaacttcataacccttaaggcattgtattctatgagttgttaaagtatttttattttattcaagcaaaaacatcctgtaactatttccatgcaaaaaaagttcagggctggagtgcagtgtcactgtcatagctccctgcagccttgacttccagggctcaagggatcctcccacctcagcttcctaggtagccaggacaataggcatgtgctaccaaacccagctaattttttaaatttttcatagagatgagatctcgctatattgcccaggctggtctcaatctcctggcctcaagcagtcctcccgcctcagcctgccaaagtgctgggattacaagtgtgagccaccatgcccagccctaaaaaaaaagtttgaaaatttcaaaataccattgctctgaaattttatctggacagctatcaatattatttgtatataaataaaacagtcactatctgtagactttgctactatgatttttttttatttccttaagatacttcagtcacctgaaacccagagaaccatcctggatatctaaaatttgggaatctaaaattttttacagtattttttctagaacttcccccctccatgcacatacacaaatacctccatttttataatgcccaaagctttcctaggattccaaaacaaagttacaactttattatattcttcagtaatttgttttgagattaaaacatcttattatttatttctatgggggagaatgttttagggaaactgactgtaccatacttaaaaataatgagtctatggccaggtgcggtggctcagacctgtaatcccagcactgtgggaggccaaggcgggcggatcacaaggtcaggagttcaagaccagcctggccaacatggtgaaacaccatctctactaaaaatacaaaaattagctgggcatggtggtatgcacctgtaatcccagctccttgggaggccgaggcaggagaatcgcttaaaccgggaggcggagcttgcagtgagccagagatcatgccactgcactccagcctgggtgacagagcaagactccatctaaaaaaaataaaagagtccaaagcagtgacagatattttagatatgttcagtcactcatgctatgaattatttccctacaatgtataccactttataaaaataattgtaaaaatttactcccttattatatttttgtcctgatttctttggaataatattattttacattgaacataaagaatttcagattagttttagttcttctaaataatgtcaggattttaagtttaataattctactaagattagtcaatgtttattatcccaaaataacaatattttacatgttctaaaagcaaactgagcatgtagtttccaagtaattgaagctgaagaaaatccatatagctaatacaacttttaacaatattaaactaaggttaggaaatattcaagtgattctaaaatacattataattttatgtaccctaaatatagtttaccaattgaaagtcatcaaatacttctaacaattccaattttaattaaactccaactcttttttttccatacgtagtctttgctgtgctttacattgaaagttgtaaagaagcttagcattacttggaaatttaatagccatcgttgccttttaatcactagaatgcagtgtaccccctcctgaaaatgatttacaccccccccccactcccctcccctgaaaatgattaatccctgcaattgagaaaaagaaaaagcagcctctgacctctgggaactggcctgcctatatctaagcctcattctttttgagaactgtcctggagctcacagctaggccatggcgttctcttgttggacataaacaacctcacagagcaccaacttcatacagggttgtgtgatgatgatgtgagacaaaaaacaactttataattttgactaagcacagacaaaagcaagatcactgtgcataccacaaaaataccagacattcccctcttttggctaatatgagtgactgctacatctcttcaattagagctttagcatacatacatttagtcttccttccctctagataagattgattgaaatacttaatcattgaattatttctgatgcctgacagagcccaatccagagcaaagccctgctttcctgaactcttcccaaaatcacttaagtaaaatccagatcctacaatgagtcttttaacacccctaagtcaccccatggtacttattgttgtcagtttctctcactgcaatgagtaataaaacccacttgttcaactacagatgtgttcttggtggtctttggcaagaaagcattgacacatccaataacttaaaatttgtgaatattggactattagttctgtaaaaatataaaagagttttgtggccgtgcacagcggctcatgcctgtaatcccagcattttgggatgccaagccaggtggatcaactgaggttaggagttcaagactagtctggccaacatggtgaatccctgtctctactaaaaatacaaaaattagctgggcacagtggtgcgtgcctgtactcccagctactcaggaggctgaggcaggagaatcgcttgagctcggggggcagaagttgcagtgagccagagattgagccattgcactccagcctgggtgacagagcaagactctatctcaaaaaaaaaaaaaaaaaaaaagaattttgtaaagttttaccaaaatgtcagcatattattaagatttctgtgcttgaaatttttattttcatcaagataatctaaacccacaagtatttaacattctacttttaaaatatatttgataaattgtttcttttttaatataaaatgtgtactttctactgtaggtccatgatgaggtttaccatctcaattggttaaagatcttacagctctaaagagaagttattattttaaagattcattatgcttgggcggtttttgttctagttcagattttaaattagataaatgggaagtaatacccctatacttctttcaaaaatagtaatggatcagtattttttaagcattatattgccagttgtaaaaagtaaataacatttatattttccttttaattaccactttagatggtggaattttaaattattatatgcatcaatgcaataggaagaggtttgtcttatccatttgtttaacatttaatatcaatatttctatgtgtgccgaggacattataatttattcttttattgctatagtagtgattgggatgaatatatttacagtcattcctcaactcactacaccaagcaaagtttaggaggttaaatgtgtagttacttaagttatcttctagaacagaatcagctagatcaccatctcaccatcattcagagatgctattctttgtaaactatttttatttggaaagggatccgaggttttcaaataaccaagtactgtatggaagatgtgctggcttgtgattgtgccttatgtaaacattttaatatcggatccctaaaatccaaaggctcccccaaaggggattaaaacataatcccctctctctattctgtagtggattaactctgtattctctctgcggctggtttgctccctgaagactacaacaaaaagattcagtgctccttaaacatgctatggaattggaagttgtaattggagatttccaaaggacgagggtaaaaatgacacactattaatgctgaatatttcatgatggtctttcttaaagaaagaccagttcgaagcccttttataaatgcccagaaaatctcctcaacagaaggatattggagtaaaatccaaaggaagccgtcccctttcagaaacacagagaagtagagaagatatgctccccacggaaagttcacggatgtgtacttaaaatttgtaatgtatttcaataaatcaatgggtatggttttgatgtttcacgatcttttttttttcatgttctcaatttggatacgttaaattactttttaagagaaagaagtaattcaccatttttagtgtttttgaccattatttgtctccaaatgccagaaacctctgttaaactataaatcttgatagtcctctgtctttagaatggagacttttttgaggtttttagcaatgcccaacaatgtacaactttgtttccagtgtgaaccaaatcacctttctcaccttgccccaagcaagagtaaaccgcatagatttcttcagagagaagataggaaaagtggcatccaagggagcgtcctggttgcttaagggttaagggagcggttcgaaccggcccgagcgttgggggattcggaggagggcgcgggaggcaggaggcgccgccaagcgcgcgcacagaccctccaataaacacaaaggagggcctggggaatagaaacccaaatccacttgtaatcgtacaagagattcgggcgtaattacttgagcaatctagattaagattgatgatcctttaaagtggtgcttcagatcgactgcctctccctttccaaagaaaaaccttgtgcaaccgaggtggaccccgactcggctgggcagaggccgaggcccagagtccgcgagccccgggggctcatcgggggatcgagagcagtgaaatgaaagacagggctgtgcgtgggtctggcccgggcagtcccgacagggctgaaagctgacactgtcacagtttgctccttagccacccccttgtaatcgcgacagaagccagcccagccctctgtgttcccgcagcctcgggaacggcccggcattgtgcaggacggtcgcagattgggtgtgtgctgcgccagggaaagccaacttggccgcctctcccgagcccggcccggcgggggccgagggcggtgtcggcgcgagggctctccgcccggagggccgaggcctagcggccgcggggaacctaactttttattgcctttctccgactgttattgtgacgcatctgactgtatgcatttgagagaagtggaagggattatgatgcgcccttgctacctacaaatgaatagttacatccgatccccacgttatgtataacgttatatcgtgtttcgaatccaggattgcgaagaatggctccctttggggagactttacagaaaacatttaggtaatatcccatttgaattcatattccatacgcgtaattcgtgattttcaaccttaacagattgagggaattcgaagcaagcaccctggcaggcacttctagtgaagctgtttctgtagtttcaaaagttgagaagtagcactttcgcacggttttttgagaaccgttttgttcaagcgtcttacattttcatcacttttgatatattctctgtaagaaaatgactaagattttcgttcttttctacgtaagaactttatgtaatgtccgtatgcacgcgtatgtatgtgtgtgtagcgcgccttaggagaccgatattagattaatcttcctgcaagaggcaaaccgctctgaacagcggaatttatcatttagatccttgcccccttctcgtcctctcgcctctccttggggagcgccgctgctgagtggaacggcttcgcgcgatggctggtcttgggggcagtgctgactgcctagggtctctggaaaagccagtgatactcaatggagaattggggcatttgtccgttctgcacttttaagtaagttaatggcagccccttaccaaccatgtaggatttctaggtggaaattgagcgttattcggtatcctgacctcctgggttttcataccattttttctctctagtctcgttataaggtaatgtataaaagctaagtagtccttatcttacgtgaaaaaagagtttgccgcataatacaggcaccattttttctagtgcatccttaccaataaaaacctctggtacctttctgggagggagcaggaagggccacaggggctcagcctgactccccttgtccttgccttgcaggcccagtggttctcagcacccctgcccagctcatcgctcccgtggtggtggccaaggggactctctccatcaccacgacagaaatctacttcgaggtagatgaggatgattctgccttcaagaagatcgacacgaaagtgagttaaagcgattccatgtacagtattggtggctttgtggcaggaagtggttttcaattttgtttggttttacctgacagtggaggaggggagcacattctcctctttctcatagaaaataaaatgaatgaaatagcatgttctctttatggaattgaagaatatattaatgaatttaaatcctgtattaccagagcatgcacattttaacagtctttctatgagtgcctttgtttgcatttgggcagatttggtagttaagccaattgcttccaagtccctggggcccagaatctcaggctctgaggctgactttgaaaggtcttgagaaatttcttattaagatcacttttaattttcaaaactttatattgtaatgtgattattgaaaagttataaggaaactggggggagagcatttagatataaattaatctccattagtacacccattttgtccatctcctgaaataagaatgggttttatatgtggatttaagagaaaagcaactgattctctgagctttgattttaaatatatatgctagcactcagatgtttaaatattgtattctttggatataatgccagaaaatacaaatttggaccatttaaatgcatatttattaaatgttattgtgtagattttaaacaccagagtattagagtagctctttctcagcattttctgagatctgttctaatgttttaactttcatgttactgtgcaatttgcaaacttctattctggggttaagaattcaacagcatgaagtgtcatgctagaaattctagcatcattttgcaaagatcttcctttattttcagaggcagttattctaaaatagtcaaagacaaatgctcccacagatccagaactttattgtttttaatttagatattgaaataaaatgttataaaatagtatttgtagactagagctgaaatccaaaaatttaccatcacctgaattaactaacttaaggcccataggtgatcagccttttcagcacttgttgactactaaactcttccaaaggagagccatgggacttcttttacttctagctgcaaatgtagtttttaaaatgagcttgaatgcactgtattttattttaaaataacttaaattttgtgttcatccttttattagcttgccctatgaagtcaaaaagaaatgttgaatttctaatgaatttattctgctaatggaacccttattacataaaataaggtttgacataaaatatattggtcagaaaggatcgttttattagttttcatacataattttcgaagtttcattatgactttgttaagttcatttcctctgaattagtcagatttttaactcagtcatctctactgtcatgatagactttttttcttatattatcaaaaatgctacaagaagagcaagctttcaaaggtagatttaaattgtttctgttgtagaaaggaattgtcttacaagtaagttagagactgagagtagattgttatcttatggacctatacagaaagagcttttctccaatgttttatttttaaggatttcattagcatatttctcaaaatatttaagatattcaagtgggtttgattttcaaaatgcatcattacatcttgtgataggaaacaatttaaagtgagacacaacaacttttattttacttcatttattaccatctaattaaataaaaaccagcaacaaattaaaatctaaatcacaaaagtaattatccagtgtatttcaagtgcatttttcaaatatataattcagatattcaagcgttattatataagctgaattcaaatttctttgaatatatttaaataacatttcaagtatatttatggaatgttagaaatagaacaagcaatatttgaaacaaaatgtaaactttttaaagttcagacactttcaaagacagataaaagtaccaggaagaaatctacctttaaatgatatctttgttagtggaaaatgtctggaagtatccagaatggcaatttaagttctgttcaccaaatcacaaaacaccaacatccacactttcaaagacaatgtgagatcacaatatttgttacaaatcaaaatatacattacagtttctttcagatggcatatccaaatcgtgtttactcacagacagatgcacctaaatcaccaggattgctataatcctttgatagttaggcagagtgttcgtctcggtctggcgttacagctgggctgtttacggagtgttacggtgtacttttcaagggagataggaaatcgtgtggaaagaagtcttctaatactagtggctttgggtttttctccatccgcttcccctactttttctccccttgtgggggtgggtgagatgatgtttaaatattgtattattattcctttttaaaggaagagattgtttgcactgcggagtggaatattaggaattgaacagaagtttacacttaataaggactttgagaagggtaataatttcggctcttgattaaatcatcctctaaagtttttccaaacttttcgggttggtcaggatctctcttgccagtcgccacgtttgtttggcagcgttttccagagctgagtgaggtttgccttgaaacagatctaagttcggtagaaagtagtggggacaccgccggcactgcaggcaggagataagttgcagcaaaatcccgttcagccgatcacccaggcaagactcgtcccagtccgactctcggggatgcttttcacactcgtaggaaaccagagtcttcatatggtaattgttcaagggctggcccggcagttcaaggtgacgatcccttaaggttttgaggatggagaggcacttctttctgcagccccccatctgcagtctgttctctgcctccgcgaactgcagcacccaggcgtcgctctccgccgagctctgcttgccggccaaggagtggcactccttggacaagagattgaaaccttccgccttgacctccgccacccggttgggtcccggccaggggatgtggggaagtggccagtgggcagcactcctcggccagatcccggtgcatttaaaggccggcgtgatctgcaccacgtacctatctcggattctcagtttcacttcgctggtgtctgccaccatctttaccacatcccggtagctacatttgtctaccgcttgagccaccagcgtctgaaacctggaccggattttgcgcgccgagaggtagccggaggcggtaatgaattccacccagagggacatgctcctcttgcgcccgtcgctcaacttcagcaccgcgcagccgggcagtgagccatcgtccacgaagttgaacacccccatttggttgagataaagcaccacttcaaattcggtgggggagatgacctcgaggccctcgtagcgattgtccatctcgttgagagagctgatgaaccgcggctcctgcacttccacttccttcagtacgtcggaaactactttgcagacttcccggatagttttggcaatggcagctttcctggcttggcatttttcgttgtagtatttattcagatggtagaccagcttggcctgggccgcaatcatgttggggcagagatccggattgtacaccggagtctcgcagtaagctgtgggatccaatgcggctgctagagctggagccaacttcggtggagaaacgggccgcaacactcagaaatggatcaaaaatgcctttcggaagtgctgcagcgttggtttccctgctgctgctgctgctgctgctgctgctgctgctgctgctgctgctgctgctgctgcttttcccttccttttatctttgagcccagccgttcttaaagtgaaagactgtcctcccccctctgcttgtctctcttcctcttttaaagaatccttgtgtgagagaaccgcatggagagatcaccttctcaggaataaaaaacaaaagttgcgctgagacccagcaaagctcttccagtagtcaaaataagcacccctttccgtatttatttgcgctttcccgtaatcattgtgtgtgcagcactgttaatcaaatggaggaaaagtgtgctgagtgtgtgtccggggtgagtgtgcgtgtgtatatgtcagaagaagctgctgttggtttgtctaagagcccagatgcactcgtgtggaaattataaaggcagggccaggcaggcgggcggccaatcgccactgggctcgtcacgacagcctccttcagctccaacccggctaattaatccccactcatggatataggcacacaaactaaaggtaggaggctgctgccggcggaaaaccactcaggccacctagacagtttggaaatcaagaggaatctctcagctttggtattacttgaagcatattgacgttttgaaaagacttggcaaagcggctctcttctgtgccgaaaacctgcttgtcttttaccgctgaaatgcaaatacaggtgtattaatgggcatccatcaattagtgatcttgacggggttttctaaaacaaaatcactaacttgcatttagagtaagataattaacgtctgttaatccttggggtcttcttaaatgcaggttgaaagtttgttctttcatgcagactactggcatatggaagttggctttagatggaggagtacctgtgtaattttctcattctggatgttcctatatgttaaaatgattttttgaaacgttatggaggtagtatgctctttttttacttatgtttttttcttttctccatttgttgaatctgaaaattattgctgagtgtgtgagatgttctacccctgtttaagttaggatatttaaaaaatatttcgtacatccctctgccccagcagatgcagtctttgcactttggtggacttgcccagcattacaagcaggacacaacgctatatatgcacttatagaaacatttgaaaaataaattgtctgtgggatggacagagtactttagcgttatttcatagtgacctgtattttagtacataaaattcaggtgagatcatagagatcaagcttcctcacagataactatcccgaaaaattgaaggtttggggtatctggcttgtttacagatgtataattaaggatatatctcctgtcttaagtgtccttaagtggtgacctggcagtagacttctaattttatactatttcgtgtgatttaattaagggaaaatggttaacatttgcaaagaaaattaacttgcagttatctggggggttttttggatttaaacatcattttgaaaacaaaaatgaaataaatcatttcatttctgaattttggaacctggaaacaggaggaggaatttttttttctagttggtggtccagttgtgtcctcaaagtacaggaaactaaagaaatactacttagtggttacgttgtggtttttaaaactaggtggatttttttaattgtctacctttaatttagatgccacgtctttccaattaagaatatttcccgtcaaatcctataactcccggtaacatgtttgtagacactttcagagtcacttttaacaagatattcttcagggctcccacttgctacttaagcttttgatttttgtttgtgtgttttgttttgcacaggcacagcatcacaaaaccacctattatttaatttctccttatccaacagtgatagattccaatttagctgaaaatagtatacattggggtgcgtggcacccagctactctatttcccaagaaccttccatccccttaagagcagggtctgggaacacccaaaaaacccctccccactttgccgtcatcgcgggtgaatgcaccactaccttttggcagttggaggggagacccatcagagccggagaacctgcagccacgacggcgaggatgtgcagtggtctctggggaaacgccgccttctgccctcacccggcgcgtgtggccctgtgccgtccgctcgccgcctctctctcgctgctccgcattcccgtgccctcttactttcctctctgggctcaagatcgctacgctttatttctgcgtgagcttatttgaaaaccttacttggtgtcccggcttactctccacgtctgctccagaccacggtctgcccacgcacccctcagcctgcaccgcccacgtccggcccaggtgtggtcgcagccaagccccagccgcgggcccctgcgccctgcgctctctcccttgggttcaggccagagatgcttgccccaagacctcgccccttgccttcttgggccacctgcagaacacccttggttgtcaaggacgtgagacagccgaggacggggaggccccagggctgttcgggggaccttaagtgggtccaacgggaaggacgcgggcctgcgagggatgccggtcgggcctggctggagccaggcgcgcaggtggcgcatcttcggggctcactgtgcagcttaattgggttaaagcgaagctaaacaccgaagcactttgtgcaaactaattggtgcaaccagcgccttttcactaacgatttgcactttgagaaagaaaaatggatggtgagaaaaggtatactaggaaactcattagatctagagtgttcaggaaagtgaagtcatttagtttaaaggacgccaggactgtgttttctaagctgcttccttaagcacccctcacacaaggagctgaaggtgatttacataacataggattcaccggtccgcgattatcactgtgggtgaactgggcgccctggaatgaataatactctagtgcaagtactgcttgttgctgcaacacagtgattttctattacactgaacacgtgaaatgaattgccttctgtagctgaatcctttcagtgatcgtagacgcccctcattgttgaagcgagaattaagctattcggagaagcgtgttttccatccccgaaatttttttatggaaatgacctatagagagggattgcaaataacagtacatttttgtgcagttcagccgattttaatctaggcttgggggatatatttattttatgggagtaatatatttaactatttttcagtgaattttaaaaaaatatcatttgacctattaaactagttatgtcaaatgattatgtagtacatagagatggcttaatatacatttatgtattaatgtgaaaagtttttttaaaaaactccagttataccagtcttgcaatattttttgttgtaaatatactcagtgctactagaataaaattgtgtgtgtgtcatgctttaggatgtaaatacttaattgttttcagtggtaggcatgcagacatctttgacatgagctaataatagaatgataattgaggaaaactggcctaattgaaggaaaaaaatctcaagaatctcatgatttaatgatagtttgaaatgcttatattgaatggtatttagaattttaatgcctaactgacttttacattgcatttacttagtttatgaggcaggctcgatttaaaatgtaccagttaggaaaaaaaaaaaaaaaagcaataaggacatagcacaccattatcataaatgttagtagtattagtgaatataaaataattaaatattgtgatccttaacacttcgaagcgttcgaaataacagtggcaaaacaactttgcctcaagtagtatttcctaaataacttgtctccacttctgcagacctgcttacttatatgggatatacaaagtaattcataaatagtgtcattattaagcttaaagaaaaaccctgttatgttgagaaatacaagaatgcaatatttctttgttttcgaaaaaaacctgatttaaatttgaattgcatgttcacaaatctcagtaattgtaacctttcatctggaaaaaaggtatctgttaaaggatatgcacatacatgttaagtgcttatatagatattgtttggtgttttttcattatctgctagctgctagtctattcacaagtattaatgaatttaaagttttatttttttaatatgtgcttattacgctggggagataaaaagaatatgaagttgagtttattacattatttatccctactgctggagtggctttgaaggctcattgtagccatctgatttctttcccccttctttttttttaaatgcacccaggctatttcaagtgtttcattctgccagacacaatatatttctttttttacactagagaaattaaagacagatatttgtgcagggttttctttatgtgtcacattaaataaagtaaaatagagagagtttttctggtaacctaatttgatggcatctatacctttcttcctgtgtgattcctggtataagaacacttgagacaaaaaatagcttgaaacctttcaaggtttcagtgatttcttaaagtaattatttcatcttttaatatcagatttatttcaaagtcaagcagaggattgaggtcactgtttgcacaatttagaccctattttatttcttcaactagaacattttgagaatcgtggttaattttttagaattgtttattcttcacttgactgataaaggcctttgcctcagttttcttcatcaccctagttcacaatcatatagtcacatttgtagtgaagagtactttttttctctacagtgttgcttaataagcttgatattggtattaataggtttttgaaaagaaaattttgagattaaaaatggaagttgggagtatacttgtaagaattgaccaccgctgcttgatttgcagacttgaagtaatactggataactagccaaaacttttcttttggtagaaaaagaaatttaaagcctggcttattttcataattgtctctgtttcctcacttcatttgcatatgtacacagaggtacaggatgttttcagttgtatctgtaaactgaaaaaaaaatggggaaagggaggttatcaacctaaagaattttttattgttcagcataaattgtgatctctaaccttttccaaacatttaaggacaatgaagttagtcattcatttattgaatactgtgtaggaaatatggattccaatagtctaatttctcacaaacccttcagaaagttactattatctttctaataaaactaaaatctttttgttagatatcagcttataattttcttgtgatattatagaaatattcagacaggataaatgggctcacatgattcttttctatataatgtatgaaaattaggtatttcctaacctacaacatatacacaaatgtatgtatgattttacatacatgaatttacgtacatttgtgtatatggctacatttttagtactcttaatatgctatctttttattgcatttagagaaaacaaaggaatcagaatcgattagtgtctgttaatccctacatctgtactaggtcatccaggactgcattgctctcattactgtttcatactgtatgtgattaagccactggaaatattcaacatgaccttgagactagaatatggtacatagataatcaacttccagtgattacatgtctaaaataacctttcctatttttaatttatagttttggagcttattttttaatgagcaaagtaattcttctaaagtaagatttattttttttaatgattagtaactggagtaataatttaaaaggataattacataaaatagaaaacgattaccttttatcatgtatattatgtgcagtaaaataaatggtttacagaaaaagaaggaaattagtttataaatataaattttctttatatctttacatataagtatagagataactatctgagaatataatacctatataatatttcatttccagttacatttcaatattttcactattgtaataatatacattttagtacaccaatatgtactatttcttgaaagcacactttttcatataatgatttgtcaaaaatatcaattctaaagtaatactaatgaatagttaatacttttacattcacatatccttatccattttattatctaaaatcccaatcaaattagaagcatgaacagcatagtttgtaagatgtagtggtgttcctgattaaaaaaaaaaaagtgggaacctagtgaaataaaatgtatagctttgtttttctgtgaaatttattttttttaagttagatatgtctgtgaaatttatttttttaagttagatatgtcgatgtgtactttgcatacagtagtattccatgatttttccatatgattgtgccattctatgaattctgacaaatatataccatcatagaagctctaccacacatgtagatagaacatttctattaccacaaaaatgtttcttcatgccctgatttcattatttttatttggaaattttatgattaatgtataaatgtctggctgttttagttttatatcaaaagatctttagactgtaacaccgttatttatttcccctagagtttactattttgtcatgcttctaattaaagacaagttttaatcaaaaaacactgacacaggcaaagtgtaaaataatatttcagatatataagcaatatgtttataatttttattttatgtaaagtttaattttcatgtatgtgacaaattaatacttggtagaagattgatttttcaaagaaactcctaatatttagtagctaacatgaatatatgtgttagatttatgaatctgatttacagcttacacatcaaaatatgcaagtaagaatgggtttctcatataagttagcaacatttgaggcatatttgtaatgtttctagctttatggcactagagaaagaaatgtcaagatttctcaatatttttactttacattttcagtaaattaaccttccctttgagtggtaggaattgaggctaaagagtttattagatctaatattacttaatatatgcacattcttgggacatgtgtataaatatacattatcctaattttgtataaatatacattattatgtaaatgtagatggttacaaatactctaaaccaagaattattaaattataggagtgaagacattgataatgatgctctttcaaatattttgtctttttacaacttggaatagtacaactagtcttttatttcttcccccaagatatacaaattatttaaatgctttctgttttgtatttttattttgcagttacaatagaaattttaatgttatgcatgcttacaggcctattaagaaagaagttattgctttcttaataatctcaaaccatctttaggaaatacactctttttatggtttgcaaaatagcccatgcatgcatgcaggctgtgtacagacacacacacacacaaaaacaccagtgtttaagatagcaaaagattgaattggcctctatacattttccgtattcatctgttaaaaggaaacaaccactaaatattggaatcttgttgccaccaggaagtaatatccacatccacaagtttgtctcataataacccttaacagtttttgataatacctgaagagactgtacctaaatggatttttaaaataacacgggaaattccaacagcatgtattcagtcacatatactacgtcaactttgaatgtcataagcttttaattatgaaattgagaagtttattgctagccattttgtccatagaaaaaatttacttaaatatttacctacattaatatgtgtgtgtgtgtgtgtgtgtgtgtgtgtgtgtgtgtgtgtatatatatatatatatatgtagaccctcactaatttaaaattgttttttacttttttgcaacagaccaagtttaaattttttgcaaccttaacctgcatttgataaacaaaatgtataactcttcagggggaaaaatgtgggatgttttgttttttgttttttactggcaatttcagttcttcatttgttttgctctccacgctgcattagcacagttttcccctgtgtgcatctgccagtgtacaatttagccacgggcatctgtagaccttgtggtgatcagtattgcaggcaaaagccatatgtgtttaaataaaaaaaaaatctctttatttcatttgctgttttaactggatggataacttttgtgcctcaagacagaaaaagaaaaaatacagaaataattaattgcctctattcttgaggcagtttcatttcccctccaatatggaatgcttgtcagctttcctgataaatgactgcatgtatttgcatagattttacattaacacaaaaattagttttatttgtggaaaactagtttacataataatataaaacccctgttattgattatgtttccaagcattgatgactttagaggggtggtagtattctaaattttcaaaagtctgatcaacctgtataatttaaactttcttttgataaatagttttacattaagatctaaaagacatatttataacattttaaagttttaaaacttcttttctagatatacttaccacaactgtttcagactcatagtagcacccatttggtaagaagattttgattttgaacttttgccaaggaatatttttaaatacatattaccaattacgtacacttcagccaattggaagactgcatctatatgaattactttaattttcatattcatattatgaaaaaagatgggtgctatattggatgtgtacagtttagctaattcttgggaagttatgtattatttacaaccaaatttaaaatatatctgagaactgtcctctccatctttaacctatttccttcaatatacttaattaatcacccagccctgaaaaaaccactctgctggagctgttagggtactgaaaacaattctacctctctaagtggcaggcagtagatgtttattcatactataatctggcatcttgttgtctagaggcaacctgctaattatgtgctatcgttgtattatccatgttatggaaaattcaaatatgttcactactgttagttacatcgcaaagcttttcgtaaaatatacttgatcctcaagaaacctactatacttaatggcaacctaaaccaagagtgtctctgccacttcttgattctgggacaccctgggtgccagctgtcacagctcagctaatgatgacaaatgcccctctctatgcagattgcagagcttgcaggctgctgtgaaaggcaaccagattacctttcttcagatagtaacttaacctttaaaactcatgtcagaatgaaatgatcagctgtgatagtttcaatatctgtatctttaaaaacaaaaatcagaataatatcaaataatgcttttaaaagtttccagtatttgtatgatttacagtgttttacccttgaatgctgtaatattcttaaataagaaactctgggtaagacatacttcacaaccactttagagtgtgtatttgaactctgcgtataaatcaggtaataggtaattgagaaaattctccagattgtttagtctaaaaaataggctgatgaaattttgagggaaaatatgttcttctcttcacctgaatgaatggtaaagcctcaattctcccactgcttgtacaagcctagcctgtcccaagccaatagttatattatgtcattaaaacttagttattccaaaatgatttagagaataattgttgctaatgattgttttctctgggtattttcaaatatgatcttttaagttattaatttgttctatagaaatttatcatattacagaacctatacttacatggattattcaaaacaataatgaacaccattaaccataatgtaattcagagggataaattacctattaaatgagataatgctttacaattgcaacattcttttcaatttacaaaggatttatatccattaattcatttgatacttaaaataattctgagctgggaaagatgggtgacaaggaacagggaccaatatttaatgagtatttaatctcatttaatcttcacaacaaatattagctcccatttacaaataaagagactgaggtttagaaaggttgcatcttaccagggtcacacaggtaattgcagagccaggtctgtctgactgtggctgccatcagcattacagtttctagactacatatgtccatagccagatataattcatagaaactgctactaggcttgcatttacataaacaacataattgatgagttttaaagataggttctttataggatgcttttaaataggtaaatactgagatacttttatgttataaattttaattttataaggataatgtattgatctatcacattgggagaaactatttaggaaagatatgtactgtttactgaatatcaaattggactaattcacctagataaccacttcattgtaaaacttaagattaatgggatatacctttataaatgtgatgaggagaagcaattatttcaataattacttgagtgaaatatttatatacttttcttttataaaggtttatccatatcatagttttactatgtaatatcagtgagctataccacccacaatattgtttttcagctcaagacacattgaaaacttcctttgatcatgaatttaagtgcagtcatttccaagaaagctatgccaatgccagttgtatttattctgtagtaaattattctttggtatagatactaaaatgtgaggaaattttttcaatgatacatatgattatattattatataaagactattttatgtactgattagtagaattatattagtacttatatagaattagtacttatagttactaatcagtacttatgctcaatttgtatttcactctacataaaaattaaaacttacagtgaaaattttactaaaatgtgtcatgcagttagtatcagggaaaaaagtaattctgccgcataagtcagacattttatatcagggcaggaaagaactctggaggataatgcaatgtaaccctcttcataactgtctgaatcttctctacaccattaccagccatggtaacaaccatagccagaggtggttatctaacctctacttttacctccatgaatgagaaacttactacctactcagatagttaattgcacttacaacagttctagtggttagaacgctcttcctaatattgaaccaaaatatttccccttgaaactttcaccttctggcccctactttcccttctgaatagtattatccctttaacaaatatatgctttttaaattcagcatttcagataccaagttgaacatactccagtctttcagctattacacctttggcatcttttaagtcacctcactgttcaggagccattctggtacatgattttcttcaagtacggtgcctagaaagtattactcctagaatggattggtacatgtaaagtggagaataatagcgaaacatgggtcacatgagctttttgggcatatccatacccacgcagataaatgctgtatgtcaacaaatatcttatttgtttaaacatattattaccgaggtcctaagtacatgacttttgtattcatccaactcatatcttgctatttttaggtattttttccgtgacttgacttataataataagttatacatcattattttaagaatcaataggcataacagttctttctaaaaatgtgttcataagctacacatagaatattcagagcaaaacaatctaactttaatgaatttaatgtttttgctcagtttaagtgtagaaggaagctaatccacttaataagacctcaggatacattgaatttactaaatactccacagccttcgtatagttttttttccaaatatttaaaatcctaatattagtttttcatagctttatcgaaatgtgtaactaagaagcctcatttgggataaagtatatactttatgtattttggcatttatcaattttgctttgtcaataaattttgtatctacaaatgaaatctgcaggtttcccacatgcttgatcaatgactagcaaactaataaactttcaatgcaaatagatgtgcttctaggacttgtagactgttataggaatcaccaacatattgatctacatattttaaccttttgacaataacaagagtttctaaataatttagcatgagcagaggtaaatacttttaaaaagtgatatttttaataacttgaagccaatgtgaaaatttgtaaattaaaccaaagtagtcacaagacccattatgctcagttgttttcttcaagtgcagtgcctagaactgaatattcagtatcacagagtgaactggtgaatgtagggcaaagaggcctcccttaagtattaaatacattgttggaaaaaacgtattctgagaattctcaaaacacatttgagaagcagtagtaaaatacaaaatgcattttaatatatattaattaagtaatttgtaaaatacaaaatacatttatgtctgtatgggtggcaaaaaaattgcattaacttttttgtgttaaagccttgaatttctttaagtgcaggcgcatgtttttatttgccaagttttttttttaatgaggatgtttcattactactttatttattactgctgtgacatctaggcaataaaagacaaagacagcctgcctgaaatttggctttcttgcagtttgtatcttgaatggggaataaagaagtccagtgcgtttacaacagaaacattctcaagtgaagagctgccccatctgtttcatctggtggcttatgcaataagaggtgttatcacatgaatctaaatgcacaagcggtcgttttatgaactctttctgtgctttgaggagtttataagttgcctactctattgtgtatcagtcccagctgacccaagtgcattctgctgggcatatttgggggataattagaactaatgaagcctggaatacagctaattctctaagtgatttattcttatgctcttctctgatccctaagaattctccaaatcataatctatgccacttattttttcctagcattgtgttgatacagctactttatgcttagctgatggacatcaaaagtaaattcggtatttgaaaggctgagaaacatgtttcaaagtaaaactttacgttacttattagtccccaggcttgagaagaatgccagttcttcaacattttatgtttttgtttaaatctcaaaatgtttatggcacttgcaagtagataatagcatagaaaatataaagcaataaaagctcattaaaaaatgtaccactgggaaatcaaacctacaagtaaaataattgaaaattattaatggaagtttcctatttcttaattaggtttcccaaggaaatctgaagtttaaaaaaaactttatgaatagctttcatgttccaaagctgtttcattaacctggcttcactgtcctagcagtgttgaaaatgatgtttctttacgtgccctcaccaagtagtcagtgattcagtggcctgtaacgctgtaaatcccatcaacttgctttcctttcctgttataactgtttcaatgagtggcacttttgttgtgcgggttcagatctggtagcttactgagggcacactagaatgaggacagacacaaatgccaacaaaagaaggctataactttattaaagccttatactcagtaaataagatagtggagccacttcagctaagtagttttataagctatgtcctatttgatcttctgttgtctagaaactatagtagaatttattaagaattgttagttttacctattgattccagtgtttaatatttaccatattctagagcccagataacaaaacccttaagggcaagtaccactttattagttagacatactgaaatacctgtactaatgtagatcaccaactagactgattatcaaccaaaggaccagttggagattcctgaatctcattacaggatacctaatccagcctcagataaattctagtcttaattgtataccctgacgtaagaagttactgtttctcatattttaccttctgcctaaaagtcagctaaacactcgaaaacatgtcttaggaacttgatgaaaagttgcaggtcatttttttaagaacatttttacatctttaaacaagacaaagaacaaattggtaaaattggctaaaactgagtttttgttatttgcaagttattctgctaggtgctttatctatattactgtatgtaccttcatcttctcaacactatgaagtagaaacttctggcctcatttcattgttaagaatctgaaacacagagaattcaagtaactcttccaagttcacaaagctaggagttagcagagttaagattttcatctatgccatctggccccaggctccagagtgtgctttcttagtcatcatatagaacctctctaagtttgtcttgtcatctgtagaacagggataattctgtgtcatagggttgttgcacaggttaaataaattaatacacataaaagtttatgtgttttaaaaagaatatttttaaacttatattacccaagaccacacagtaactagcaaagataggactcaaacccagctttttctatctccagacttctgagtttatgtagcatcatgcttaggtatgtttgttgaatgaataattaaatgaatatcatctgttctgtacttcccagtggaagattttgttaattttgctggttattttgatagcatatagcaggtactcagtgcctgaatgagtgaaggatttttcaaacaatactcgccaatataatatgttctatacattgatcactcttaaatttatatctctagccaagacctctccccttaatttcaagctggtatgttcagtggtcttctccacatcatctcacatatataagatgcatttcaaacttagattcccaattgagcacctgcttctccatcagtcatctgtacctcagtaaactgcagtgccttttttccggtttcttaggccaacaacatggctgtcatctttgactcctcgcttgcttgtgtacccaatatccagagtgtcaacaaatcctccagactctgcccatctctcaccaactttacagcttccatccttgcaagccaccatcatctcttaatttatttttggtgcccattatcctgtatgtgtactactggttatctgaggcaatatagaatgagaaaaagtacaaggaattatgctagggaacatagcttctcactaatattcctctgtgaggaatatgatccaataggaataaatgagaaggaatgttcagaaaagtaaggcggaaaactaacagatatgactatcttaaatgccaaacacaagagagttgtaataaaaagttagtggacaacagttcagctaccacatagagttcaaataacataaaaagttctttgtctttccacatccgtatcaatggaattgtagagacagaagcagatcacaataggattgaagagtaaatcggaggtggaaagtgaggtagacaatacactttcaagaaaagtaggattgaagactattctaagtgaagtaactcaggaatggaaaaccaaacattgtatgttctcactcataagtgggagctaagctttgaggatgcaaaggcataacaatgacacagtggagtttgggaactcagggggaaagggtcagaagggaatgagggataaaagactatgaattgggtttaatgtatactgctcaagagatgggtgcaccaaaatctcacactaaagaacttactcatgtaaccaaataccacctgttccccaaaaacctatggaaataaacaatttttaaaaagtagaaataaaggaaatgcaagagatagtatggtaattatgaagtgatgcaagaaaaaattttaaaggtatttgaacatatttagggcatagagaaagaagccatagaggagaggttaaagttaaaatgaaggactaaatcatggaggtctctctatctccaagatcagtagaaggaaatggtatcattgtcttgaggctacaatgagagatggcttttttccttgaagataaactctacacaattattaatattgcattttattttattccatatgtatttgtaacagtggagggtgagatgttgggtttaggataaacaggtggagatctgaaaatgtagcaggaagaaactgttgcattgtggaagataaatttgtagatggtggtttttaaagttggtggattatacaactaggcctcagttttctcttggcacttaaagcactgggactgaggtaagcttcaagaagggacttagatgtttaaactgtcactaaaaggaatgggagataacgatgctgaatcctgctttacctggcaaccctagatgaaggagaaaagtagatgtagtaaaatttctaaatagataagtgactgagatagcttaaacataggcagaatagtttactaagcggaatatggacacaggcatagactgctgaaatacaaagaaatcaaagaattttaagattaaggtacagaatagattgtctatatgaatactgaattctctaaaagtgattataagattctgggtggagagggaaagaattttggggaaagaagacccatgaagagtagaatgaatgctgttaagtgaatggaacaggagacaatctgagtcaccagagcctgcacaaaacaaacaaatgggcctaagaggggttgctgggattttggaagccaaaagataacttgatgaaatcctttgtagcctaatgctttgaatacttttgagagatttgataagcagttttatcatcaacaactaatgatatgggagtttatttaaatttattcctggagccagggaattcatagactcttattttaaaagaccctaacattccatatgaaagtgttttttaggtgtctgcccaagtgataatccactttagtatatctgtttccaatactaccaaagtgtccatcaggatattttggtaggacctagtcatatgttttatttgaagtatgtaaaactgccaaagatactttactcttaagtgttttcatatcatataactttctttagtttcccagtagagtgaggaagccctccattaggaaccagaaagcttgggttttagagcttgctcctttttgaatagaatatacaatctttattaatgagcttagtttcctgccctgtgtgatgaaggcattggagtagatgatttcccttctaaaattcattcagttctctgtattatttaactttgagatgagtacaaaatagcagcagttttacctttaaaggtgtatctcgtcatgtgcaacatataccttcctgaaaagttagcatatttttattatttgaattatatttaaatatatctgtgaatttattcttcaaaggatccttacaataaatcttttaaaaatgaattcattttataaatttaatgatttctttataatgtataatttcaaatttaaatctttagttattaaatatttttaaaaacaactctatatatttgtctttatgtaactttataaagggtataatgaatatgaatataaggaatacaaaaccaatgataagtaagaaaatagtaagaaagtaattaatcactttaaatgaattcatgacttcagggtactaacagaatttggaggtttgattgaaggaccaatcattgttgaggaattacagagacagtgagatatgtcagaagactagatgagagcaaaatattagagaattttgcttggcaccttctgatcaacaatggtaacaaaaatgtgattaagacttaagggaaaaagtcaagtctgcctcaaatcctgtgggtaagcaaataagatctaaatttttgaaaaataaatctgtagtctgataaattaagatgtattaggttggtgcaaaagaatcgtggtttttcccattacttttcatggcaaaaactgcaattacttttgcatcaacctaatatattgtaagccctagagccatcgctaataaaataactaaatagatgtagttaaaaaacaagtgaaggaatggcaaaagaaggcagtaaaggaggaagaggtgaacaaaaaagatatgaaagatacagaaaacgaaaagcaaaatatcagatgtaaatccaaccatatcaataatagcattaaatgtaaatggattaaacagtccaataaaaaatcagagacaggtgcagtggctccgtaatttcagctctttgagaggctgggatggatggatcacttgagcacaggagtttgagaccagcctgggcaacatggcaaaactccatctctacaaaaaatagaaaaattagctggatatagtggcacattcctgtagtcccagatactgaggaggcttaggtggaaggatcacctgagcccatagagattgaagccgcagtgagctgtgaccacaccactgtgctccagactggacaacagagtgagactctgtcaaaaaaaaagaaaagaaaagaaaaaaaaatcagagactgtcgactgaattaaaataaaaataagatccaactctgtgctctctacatacaaccagatgctgttaactatgtgttttgacccagtttaggttcaaagatacagataggttgaaaataaaaagataaaaaaagatatgcacacaaacagcaaccataaaagacctagagatggctacaataatatcagataaaatagacttttacactaaataaagccactacatacaaagagaaacactttgtaatcaaaaaagattagcttataggggagttataacaattataaatatatttgcacctaacaacaaagcccaatgtccataaagcgaaaacagatagaattgaaaaaagaaatattaaattatccaataatagttggaaacttcaataccccgctttcaataatgaagacaataactagatgtaagattgacaaggacatatgctcctcaatttacaagggtgttgcatcctgacaaacccatcataaattgaggagtgtattttatatgtatcatttttgcaccactgtaaagtcaaaaaatcataagtcaaaccatcataagtcagggcacatctgtaaatagaagactcaaacaacactataaaccaaccagacctaatacacatctgcagaacactcccaagaacagcaaaatttcttagtgcacatggaacattctccaggataaaccatatgtcaggccataacacaagcctcaataaatttaaaaggattaaaataatacaaagattttttgacacaatggaattaaaaatctttctacagttgacaaactgaacagcaaatactttggatgataggcaagattcataaatgatatagaaaccatgccatgtgacttgaaagaactgaggctagtgtacccaactaaggagtctaatttggatggtagagatggggatgaagtaggatataatagtttcctctaagaagcctgtcgtttatagcaaggagaatattaatatgtatacatgaccttccagaggacacaagtaagataattgggtggaagttacagcacaaaataaggaagaatattataactgtacttttcagttcagtaagatataggcagtattgtacttccctttttaaaaaaacaaggtctcattatgttgcccaggcctgacacaaactcctgggtttaagggatcctcccacctcagcctcccaagtagttgagagtgactagagtcacatgccactgtgcctggctctactttcatatattgtgttccttaaattggatttttaaagtcctatgtagaaaagccaaacaaggccaggtgtgggggctcactcatataatcccaatactttgattggctgaggcaggaggttagcttgagcccaggggtttgagacccgcctgagcaacatggtgagatcttgtctctaaaaaaatgaaaaccttagccaggcatagtggtgcacacctgtggtcccagctattcagtaggctaaggtggaaggatcacttgagcccagaaggttgaggctgcagtgagcgatattgtcaccactgcactccagcctgggttacagagtgagattctgtcaaaaaaaaaaaaaaaaaaagaatagaaaagaaaagaaaaagaaaagtcaaacagtggtttttaatagctgttcttctagcaaggataagtttaattcctgcaatatgtcttttctcaaaaagtcaaggagaagccttaataactggagcagcttggtgtgcaggcacctctaccgctcccaggactggagctagaacttagatattgaatcaggacatctcatgtctttctcaacaaaataatgctcccttcccccaaacaaatttaccaaactctaaatatattattgcacaacttccttatggtttggaaggaactttttcctaactttatcaaatctaaagaaccatgaagcaactctttctcctaagtctatgcttcagtcataagcactgtgaattacgcaaatagcttagttagatatgtagatgagttaaaaatagaatctgcaaaacaaaatgcagattgtacaaaaattaaggatatgatcaccagtccaggatcacctccaataggttatctcataagctgtgaacattgccacttaaagtgattcactcagggcctaaggaaccttctgtaggagaaattgaggaagtgcttatactctgtatgatttcatatacacatacaaaaaagtggactgaaaaatataaatctattttgccagatgttcttaacatttatatttatctgcattaaaacaatgtttttgttactggagagtggaattttcaataagattttaataagaaaaattatttcatttgctatattctctcagaacataaattacactgtagcagtaagttagactttctttcatactctggaagtacattttagcatattattcttccagtaaactacctgatatctatagagtgctgaagaagttagcagccagattatttggtttacctacaagagattaatttgcatatcagcaaggtctgcataaatctgggtgcagtatctttcagtcttttctctgttttgtaacacttgacccatcaatttagatagtaccttgcctgaagtacaaaaatgaggaagacatgtatattatctcttttaatgataggcaaatgaggaatcaactcttacaggtgtctgggagatttcagactatgtatttataatcttatttaatattatataaccaaatatttttatgcctttccactaattttctaccaaatgcttaaagagagtctatttagaataaaaaccacttgaatggattatttatattaagagcttactaaacattctttgtaatattggctattattttttaccttgaatgtgttgcttaaatttggactttttctcaaacactattggtattttagtggcaaaattatttaatggtagatgtttaacattggagatcttagcatgtattgatttgcacaaaaattctattctttaaaggtcatatgtaccaaatttcataaaggaaatgcattggagatgcttagtagacattttcttaggcactaagtattacttgcttataaggatattttactgtttatgtataggttaaatacttcacttgtaatgtccatcttgtaaagaaagtcctctctgtgttgaaaatctctcattgctaatcttgtttttttatatgtccagtaagagttaccaatatatctttcatgagctatggcaaatcattgataattactgttcaatttattcctccctaggcaaatgggttcctttgtagtacctaggacaagggatccacaggcaggagtcctctggcattgatgactgatggaataagccatagtgacacatagctactataccacatgagagcatcatgatttgtttattttagaactggttgtagcaatattagaggatgaaatgattttcttaaagcactaggagagtggggactacatcatcaggataacttaaagaaaagctgctcaaaaacaaagtgtcccagtctcttcaataaattgtattctctccttgactatttaatttatgcaaatgcacaatgaaaatatttttgcttcatatctgaatcttcataagaaaatgtatatttaaaaataataaaatcatatttttcagttatctacattaaatcttttattcatgttatagtttaattacatgatatctgtcttcaccaatggaaatgtaatgtgctaaatgctccattaattttttccccttataccttatgctcagttatgcctggtacaaacgacatatacttttctgatattattgatgaggtgttcatgacctttctgttgagatttgtgtggtggtgctgtttaaagaaagagtacttagtggaatttgtgtgaccacaccaggcaattgaagaataggtattatttctggccttggttctataacccaagttaattataatcactttaagaagaaaacagtcttgctatagcaagctgttttgggttttctttttctaaatgagagaaaattgatgtgatgctttttacattgcattttacagcaaagcataagatctgtttacctggttgaaattcaaattgttttattatggtgtcaattctttggttttggcagcacttctaaagtgtctattcacaaaaagactcccatagtgaatgaatgctagtgttgacaccacctaacaagcagggattatgtgtttacagaagaagtaatatgataggtcaagtataagaggcacttctcaagagcacttcagcacataatgagtgactgactagaaagtgcggagctgccactctttggcttggagtccgtgttgatgcctgcctctcttctccaaagctctcttgatcatgttcagctgctctgttctcatgtggggaataatagtagagtaaagctgcttttctgtctcatttttcttgctaatttacacattcaagccattttttgtttgctacccttatttgctattcccttttgtccaggcactgttctcttttttgcctcaggcctaagaactaatttgagcttctataattacttcatgttttacacctgtctgcgtatcatgcacccgcttgtctctgtacttaagctgtatatttccttgcagaaaagctagttttcatatacaaggactcctaagtttctcccctcagactgcctacagaagaaacacaattaaactgttgcgatatcctcagccatgcagctgacctttgcagttcatgaaggacaaatgaacgctgtctgctcagacagtttgtgttaagacattgttgagcagagagcctgagctttgttcctcatgaatgaagcaatggttgtagtcattttaaaatcattaagactctgaatgcacagtctcattctacagtgtttgctctacagctgctcttctgctttaatagcagcttattaaatttgggtcaagcgtactctgaagagtatcacaatgaagaaactgttctaaaagttacctgtttaaaaaaaggcaattgattagatttttaacttaagtgacagctgcaattcattgcctattctttgtgatgtcctgcagcccaagcagccttttgtaatttgggcttcattttgcaagagctttcctgaacaatccagggttgctttccactcggagcctgcttcaatccaattaggagtttaacaagggtcaaattaaagagactttacacttcatgtttgcatcattagccataagactgttatgtgagtgcatgactgtgtgtcagggaagagggggaaaggctgcaggatgggacagacacaaagctgtcatccaccgtgtggtgtgctcctttactgatggaggctcagcaggctagcaacaacatttccagttgtcttttggggttgctgccttgtcaaatcagctggtatatagttgtttggaggttacaggtgctagctggggctgataaagaagagtgttttttgcctactcttttctcttctggtagtctgttgtgattggacaaacgactgggaagacatgaagttgaaacctcttgagcattcattatttttgatgagatgacaactatctaggttcatgttctcactcctcgtgctctttcctggctcttcttttttttttttttttgaaaacataattgttggttctgtaaaatattatcataggaaatggaaactaatttttaggagaatagttagaggctttgcaaagaccagttacctgttattcaggaaaacagagttcactatagtattttcagaattgtgttacgtagaatagcattttgctccactttgtccataccatcaagatatatttatatttagccatattatgttactgtttaaagaaaatgacctgtttctaaaaagaagagacaatagaattctgctaatcagcagttccatgcgtgggatatcgctagagaactgttgctgtgccccttgagcaaagctttgtgctgctacacacaaagtaaagatttatctaaaataacactttcattgttcctttcttacctcctcaacccattaataggtactttagtatcatgagagttttcatagtttaatcccctttcaaaagcttttcagaataaaagctctaaatggtcctcagtattaatttgatgtgacttctgtacaatatggtttaaaactctcagaagcacatttttactgcttaccctttttcatcagagcaacgtgtggaaaataccagctaaatgtttagtggagtctctattgtgagccactgttgttgctttctgataacatagattttcaattaaaaaattattgtcattgtgatatatatgactgttaatcctcaagaatatttgggctctccatttttaaaaatgtaaatgtcttcttgttatttttcaaagctgtagttttataaagtctctgatttgcaaagaattgagagtgagtaataaagtcagcctggtaaatagtaatcaggcttgattatatgcactcagttacatctttgtttatatgtagaccacagtagcttcaaacacaagagcttccagcactaataaataacctacctcaccttttttatgtgatgcttttgaatacacatttatctttcttaaaacagttaatatatggtaaatgtaattcttgctgtctgtaaagcatttgatgatggaactatacattccatgccaagttccatttcctcgactcctcctgcaactgcaaagcctccaatatgacgggggcggggaacccctattaatccttttaaattccagatcccctctctgatttttttccacattgtcagaggggatgtatgtatgtgtgtgtgcatacatgtgtatatacacacgtgaacatccttccacagagaaaaaggtatttatttctaaaaatatttttgaagcacctgctagtgctagggactgagccagtgaaacagcagagagagctcaaacaataccaccttgcctgccggggctttagtggagtggagagatggacagaaatcacaggaaacaatgtaaacttacgactgtgaatgtgctcttattggggaatgtgatctggtcagcaagttcagagacagttttcctaagcaagtgaccttaggctaaccttttgaaaacatcatgctataaaaaatttttgtttattttctttccaaagaactgaaaatatttctgcatatgcttcgaactcaacaaatttacaaacataatgaaatttgtgctggtaatatattaggtaaaagaacatgtagaaaagggcatctggaaggagatataaataattataatttctaaggaaagttttaggctcagttttaagttacatttatggacaggaatgagcaagtgacttctaaaactattcctttttcttcattatattttccctgggtttttttttttcttttctttcttccacaaagttttttccatgatttatctgcttaccgtgtggaagcagattggaatcttccactagtgaatgaacagtgtgctgggaccagatcctctgggggtttgtgggtctgtacattcagtgacctcactatggtagcttgaaatctgcttatgacagtaggatctatacaacagaaattggtaaaccctgcaaattctcctcccctccctgcaccagcttgtttagcagcacatccgtgcttatgtctgatacagtacgtgggatttgggcctgcaaatagatttgggaaaaagagtccataacacagcttccctccatagctccaaaggagctataaatggaaactagaaagcttaaaatcaagttttggattttttttattaattaagttttatgagttttaaaatttagccaattatatcatttatcttttaagataatagccacaactcctccccatggattaagtgatgattacttttttaaatgattgtcttttgcatgtaaatgtttactagtttccagtgtaatcacaggcaatataaattcgaaggtatatttttaaactgcacactaatgacctttatcaatcagtctttatttttttccttataatgaattaaatgttgttgtgctttcaaaaccaatgtactcattggttttttctaatataaaagtaatacttgctaaatacttaaatattatagtgtagtcaatatataatagtataaaaaataaaattaaaattactgataatcaaacagcccagagataagaatttaaaatactatacattttcaatgtatctgtctacatataggtagatatataatttttatagatcatagtataaagattattttgtaacccacattattcacacaaaaatataatatgaacatatttctatatcaataagtattgatctacattatttcttttagtagctacataacagttcattgtatgaataccatatattaataataactaatcacctacaggtaaacattttttgatattttctctattttaaatactgtataattttgtaaatactcttttgtatacttgttcatttaccaggatacatttcttaaggtagcattgctggtattgagaattcatggtttgtttcattttgtttttgaggcatctatacaaattgcttccaaatttcccttcagaaattttgtactaatatgtaaaatagcatattggattatttatgttattgctcctttgtcaatataggtattattattcttatttatttttgttaacctgattaactgatcatcacactggttttaaagaatctaattttaaaactatttcttcgtgctctatagcttgtaagcttaaaattgacttcagtatattaaatgttattgtattatttttcaattttgattattccctaagagaaaggaacaaatacatgatttgaagtgtgcaaaatttatgtaaaaatatgagaatacagttttacatgaaagacctgataaaatatatattatgctatctaggaagagaagcaattatgaatattcatttacagttggatatttgagatatttcacattcttcacatccattcatgagtgaatatttgttttagaggaaacattttggattttaaaaccagaatgtggagtatccctttgtagaatgttgccagctaattgaagttacaaacaacaaaacaaccaaaaacactgcaatccaagcaaagcgtatctgaagcaaaatttggcctaaagcctgccagtttacaaactctgcgttttgtggctttcttcctatgtaatataatacacatctaaccagttcttaactaaaactgtttctcttcctttccctgaaaccttagtaacacctacctgtttagattgagcatgcccaacttggaggctgccacagttgagaccgttttgtctcatctcacacccatcccacttcactcttggacttcacttgactttatctgcagttgctgtttttgagtatgtaaagataaaagataaaaatcttttcatttacttatttttctttttttctgatattgttaatatttaagtattttatattgtaggtaggagggaactttttttttcctcttttgatacacggtctcactctgttgctcaagctagagtgcactggcacaattatggctcactgtagccttgacctcctgggatcaatcatagctgggattataggcgtgcccccatgccaggctaattttcttatttttttgtagagacagaggtcttactatgttgtccaggctagtctcgaactcctgggctcaccaaacagtcctccccgcttggcctcccaaagtgctgggattacaggcgtgagccactgtacccagccaatatgtttttcatgtttaaatgcaatgttgcttattttttggtataaaataaaaatgctacgattatcggaacctcatttgtatctcagtaaattactggcttgtattaatttactgcttaaagtaaatattataaaatatatattattttaaagaatgtgggcagaaatcagaattcaaaataacatttttaaaagaggctatgccattagcatacatactgagatatgcatttatttaaaacatacctatacttgtttggaatcatgcttactatgttcatatgaatccaacattgaggtaaaaactggctttttaaaaaaaattagttgacaatagacatatagagtttgagtttagacctataaatagctaactattatttcaatgatacgtatttggcctttgacctttgttgcttaaagactagctcacgatgctccgcagttaatgtaaaacttagttaaaccatggcgacctattccggagtatgagaattggaagtgagaaatggaagtaagaattctgaactgggagtgtaatcagctgtcactgtttaaatagtccagttttattatttctccttcaactcttcattttttcatgtaatgagcgtaaatacggactttttaactgttatattagggatacatctatgcctaagctgaagcctgaagctatattttaaatttgtgattccatcttagaaggaataaccagagtacaattttgaagaaataggttaaaaatgcattcccttaataactacagttttctcctcgaaaaggttaatgtagtaaaataaatactatgagaggtatccatgagttttaatatctggaaatcttttgtgtgtgggacattttaaaagttctttgtgttttaatgaatattcaattaattgattttaaattaattagatttaaagacagaaagcattctactttagtctgcatgttcaacttacagatttgattttactcataaatattttgcatataaaaacaccatttactttcaattaatcttcaattcaaatttaaataactgataggtttgagaaatcaaattcctttaatcacttaacaccagatccatactaattcatcagattctcttatatatttccaacttcatctattaaatttatttatttattttattttttgagacatgttctcactctgtcacctgagctggagtgtggtggcacgatcttagcttactgcagccttaaactcctgggcacaagtgatcctccagcctcagccttcagagtagctgggactacaggcacgtgccagcacactcagctaatatatatatattttatttttgtagagaataggtctggctttgttgcccaggctagtcttgaactcgtggcctcaagtgatcctcgtgccttggcctctcatagaactgagattacaagcgtgagccacctcaaccagacccatccattaaatgtataaatctgatttgttactatttacggcagtagtttaaatacttagaattttttttttaggtttataagtctgccttatgttttttaagtgtttgagaaatcaaatgtattgattcagcaagagtaatttgaaattcttacaaagaactgtgatagcaaaatgctatagttaaaacagcccaggggtcaggtgggttcgtgttctgtccgtccctcactcattcccaacaacacagtcaaaagataaatcctaagtaaattaccccacaaatttttgagttagaatttgtgataaattatttcattgcaatttttcaaaataaataaagcctcaacatgatttgtcacaagtcatagagccagttagaagaactcaacctagggctcgtttgattcctaggtccatgttcttaactccaaaccatttctcaaattatagaaccattgccatagagtttgaaggtattttctaagtcatctggtctaattctacattataggactcctttcttgaacatcccttttaatatccatccattttgaatgtttatagcaataaggacctcctgttaatttttccccttctggctactgtcccccttgtcccccttaaagctatctccaatgacttctttctttctttgtcttaaaaccacttaacataggctttgcttccaacacttctctgaaaatgcttttgttaaggtcaccaatgacctcccttttacaaaatccataggccaatctctattctatttacataatttatcataccctcatcctgaattgaaactgaccttcccttccaggatgccctactcctgttctacctcactcgcttctccttttcagtcttctttgccaaaattctctccttttcttcaaccacctaatgttggagtgtcccaaagctcagttcttggacctttttttttctttttacaattactctcctggtaatcttatggcttaaatatcctccatatactgaaaactccaaaatttctatttctagcctgactctctttcttgaacttcaggctcttatattcaaatgcctacctggcatttctgcttgagagtccaatagataaaccaaacttactttgtctagttttgaactcctattttcttttccactgcccttcccaattcccaaaatattgctgtacctacagtctttcttatcacagttcctttcagctctttcaatccagttgttcgagccaaaaccttggagttaatttgacttctctctttctctcacacccaacatatacagtctcttagcaagtcacattatctctacttcaaaatatatccagaatttaacttgtcaccatctccatggctaccatgtagataagcctcttctgggtattctttaattttgaatgcaccccgtacaatgaaatactcagaaatggcctgattgaacgtgttgcaatggaattgctctatcccttttccatcatcataattcattctaggattgtaaggatcattttagtagtcatgtcatggtgttgactggagtcaaccaaagttccagtatttcttttatattaattgctgctagataggtatcaccatctaaaataattaagtgactatcacttgtggagcacctacatatgcaactttgtttcattattacccttaaagataggaattattatctcaattggtagatgaagaaatagagactcagaaaagctaagtaatttgcttaagatcacagggctagaaattggtagaaacggtagtagaatccagacctgtttcactttaaagccaatccttggaccatcacatatgaagggctgcagatgagaaagaacatgatacactcaaggatttgaaaaacatgcaatatattgggaaagtataagggacagaatgctggcaagaatcagaccagagagggaagtgctcagttttgagggatattataagccatatttgaggagtttacattttactgacaaacattgggaaggtactattaaggtatttcaagcagatttacttttctaattaatgattactctaatgttagcatgaagaatgaattggatgacaacaatgctgagttttaatggcctaaactagagtagtagcagtgaaaaaaacagaaattgatagatcaggtggatttcaggagtaaagtggataacatttgtgaactgactggatgtgggaggtgagagagaggatgactgccaggtttctggctgagtggttgataacattcattcagaatgaccattggaggaaaggaaggtagtgctggaatgggtataggagatgtgataactttacttttggaaatagtaaaaggaatctaggagacatttcagtggtaatacccagatgacatctgatctaggatctaggggagtggaggtctcagctgcaggtaaatctgtgaggtaaatctgtgagacatcagaacatgggtggtaactgaagtcacagaactggatgagttgaatggcggattgtttggagattccatggctaaactggggctccaatatcagagtgtctagcaatcatgccctaatgggaaaggaaggggagctggacatgagtgtctactgtgtgcctttcaatggatatgccttttacctgcagatggcctgatgccttattgtccagccctgaccaggagtccctcccatgggtaactgtttataatggcggatgccattgtgtctcttgtctgacctgtgtctggcgtatgcctgcctgaccgtggctatggttctgcaaacccaaccttgtggttcccccttgcatcctagggaaaagccagctggtagctggctggtagctggttcttctaatgaaaggcacaaattcgatacaccgccacaacaggaaataagttcagaaagctgttacttatagatcctgggcagggaaggcaccatgagtcaggagggaagttctctgtcccaggtcatgtgaggcaggtgtgtagagtcagagagagagagagagagagtgagcgagtgagtgcttgcatggaaactagcagtatatgtaagggaatgggggcaggagagtcactttaagttcgtgggcaaatgtatgaatggtccatttgaaggaaatggcaaaaaagctaagagcccagtctgctaggccagagagaggcctctaagtttttgtatttggccaccggcttaagccatttgtggtgttctacttctagtacctaggcagcaacctttgctgtgttgtttccattacaaagatgccagtcttttaaagataggaaggagttgtttgcaaatggcatttaaagaatagatagagagttagtgggaaaaaattaggagagtggtagtggaagtcaagaaaagcgtttcaagaaggatggactgaccggcgaacagtgccaaatctgaaggggtcagctagatagggactgaaaatagccattgaattgaataaggcgacagtcactatgaaaagggttgtttcagcagattgtcaagggcttaaggatattaagtatttttcatttttcaagctaaaaggggagctcatttcagtttattaaatttcatcttgcagacttcaagctaacttctacttcatgattttgaatgtcaatagatctgatctgaatatgaaattctgaggaagatttttccttatagccactaactgtttattaattattctcaacatacttttgaaaacatttgaaatgggtttgtatcagaggtgactccagaatttctgtgtagaggagattaagactgtgagcgtttgaatggagaattgaaagaacaatccatggaacttgtgtgtttccatggcctatattacaaatcaagaaaaacagtgaggtgttctagagaggtttttattcacaacttaaataagtttaaggaaggacacatgcagcctcatacaaccgctctttcttctgtcattcttgacatagttttgcatttttgtagcatccatgacatgaaaataatattaaataccttagtgtccatttatattttgacttaatttttcagctctgttgttctgacctatctgggtaaaagtaatctgccttgtgttgtaagtgttaacactaagggcctgccatgcaccagccacctcgctgggatgtgtgaggatgatgtttagatagttcttgcaccagattttttaccgtattacacgttactgtctgttttttgactcagaaaaataaaatcaacttgcaaaggaataaaaaagaaggaagaaagggaaagcaaggtgggaaagaaggtaaaagagggaagaaggaagtatttactgagcatctgactaggtaccaaacattatgctagaaactttcatgtatagtatctcatttagtccttacaattttgttaggcactcattttacagtggagaaaactagagtttgagaaagtccagtaagatttattaacttatctaaaagctatgtaggaagtaagaaataaagctgagatcttattaatgtccagaatgcttgccaccacacatcatgccatcttacctggaaaattcattttcctcattttaatattttagtcctattatgacttcttaatggattttcagataacataataataagtagaaaacatgaaaataataaaatatggtggattataagtacatcattcaagtttgctattgaaggaaatgtatgtttcttttaaaataatgtgatccatttaaatatcagcaatcccaagtaaaaactcaaataaatactcaagtaaaagcttgggctattcctgaaaatcattgttagttttgagatatatttattcacatagtcagcctgcaattgtcaagcaatatagcacaggaagcattgttcaagttgctgtggaatacctattttattctctgcttacaatgactggactttaaagaatttttaaccacataaggacttttaaaataatgtatttattggtgattatcaatatataacagtatgttgcatatataacatacaactcagaacacgtaagtactttaaagttgacttaaacctacaatgaaatattaagtacagaacctattacagatttttcgagcaaggaacccatttgacaaagaaagaaaaaataatcactagcataattattactggatttgttatccacacatccagtatctctcaaccctcatcaggtgttgattgcaatgtatatttttactctaaagtattctatgcaagtagatatctctctatatatgcagttagcaaagatagtcaaatatactgctattagtaaggcagcattacactgtatcatattacctatgttaatacactcttcaaagaagttatataatgttttaattttttaacttctacaaatattttttaaattatcccatatcttgttatttgtaatataagaagttaggtattgtgtattgttaatatagcagttacctcatttatttacctgagagtactgtttgcaaataattaggagaatgacaaaaaagtatggttggaaattgtattatctgtcagtacctctactgaaagttgtttttaatgtccagtggagatgttttgatatttataattgactctactttgtttgcttaaagtatgttttgactaagctatgcagtgactatttgaagatagatattctattcaggaatttttaaaacctcaatgtctaaaagaactcatcaaactcacccgtcttgaactgtcagtgaaagcacatgcttttaatttctaacacacattagttgtgtttgcactacaggtacacaacaggaagtaaaatcgtgaacccatagcttcccagtatcaattaaaatcttggctgcatgaaacagtattttttgaggattacctgatggttgaagggttcattcattcctaaatattctgtatcctgggattaaacctgaatagcagaaactgtcaacctggactttcatgttggcccctgttctggttaaaatctttggttgcatggaataggcttcattcaagttacctcaagcaatagatgctataggtatatatggtctggaatttaaaaatggaatagctgagtcagctttagggaccaactgctctgtttgtctttcataaaccatttggtctgctaatctctgagcgttcttttcttcttctcaacagataatcttcctgtgcttactcaaacagctttggttccttgtactttcagcttgcctgagtcttatcttggctccctggcctctcagtacattgtgatatttcagcttcagttcctactgccacacagttctttctgcatttcctttttctagctctctacagaaagaatctgactcattctactcctattttttagtcaggccaaaccacggactattggcaaacctctggattagctgtcgttgattcagcctagaggaggtaccttgcggtcctcataggtcgacctccttccacaaaaactgtggctgagcccatttctctcagaaggcagctgcaggctgtcttgtactacctcatggtaggattgatttttctaagttgtgctttgggaaatattgtaagccttgaaactcagtgtaaggttattgttgaagacattattgattatactatacaggtttttttaaaactcttggcataaatttatttctagctttagtattaggaaataattgtgcaattattcctgaactcgtttgtttttatcttcattacctttgtggtgaaattattacttttttcttttttttttttttaagatggagtcttgctctgtcacccaggctggaatgcagtggcgcaacctcggctcgctgcaacctccacctcccaggttcaagcgattctcctgcctcagcctcccgagtagctggaattacaggcgcctgccaccacacctggcaattttttttttttttttttttttttttttagtagagatggggtttcaccatgttggccaggctggttttgaactcctggcctcaagggatccacctgcctcagcctctcaaagtgctaggattacaggcatgagccaccgtgcctggcctattacttctttttcaacattgcctgttgggagttcacaaatttgtgccccaaacacaggaagtttaaatgattctgtggtatgcttttttagtcttattatccaacttacacctgaattcattttctgtttttcacctttttttaaatatatttctaatttgaattataatttatatattcctgtaagtcactttatatcttttcagaagtgaggtatagatgtaaagtatataaattataacacattcaggaacatgttcatgtttccagctagtttttagttaaatgtgagcaaattttaaagaaatggacaaagtattggaaaataatagtatgtgacatttttctgtatttaagtaattttaaatcatccagctacttttttaaaaaaacctaaaattcccattgggtttagaactatctttcaaatataatttgagattagaaaatctattttattacacattaatcattttttgtcataactatttgtaacatattctttgtcatggagaaggtagtagaagtgtaataaaattaatatacattttaaattatttctacataaacccgtttctaaaacagcagcctctagccctccaacaataacatactcctaaaattatttttccccagactctacttcttggctactcctttagaaaaaaaaaaaagaaactgacatcaattttatataaaagaagcccttgaggtggaaagttgggaagactgcatgagtttatagcggacaaaatgtcgcttacattttgctgctcagtagtttgatatactcatttgctgatgtgaaatgacgagggcttacaaaacagggttttgttttttagctgcctgtagacctagtggggcctaacagaacccagtcagcaggtcattaactctggagaaaacagcttgcattaatatgctctaatccggtataattagtcaaattactgcacgccgaccagcttgtcatgtgttgtcagacttggcatgtacgctgggttgcctgggtccctctggaatgccaccctcaatcagaaaaaactgctcatttgtagtgggtcttgaactcttgatgcaaaagcctactaaaatagtggtcatagaggaatttttattaatttttgagaaaaaaatattttcatcaaaaataatttagtactttggtgattgaaatggaatctgttcatttttgctgttttctgtaccatatctatgtaatactccaagaaaaattaacattagtgcaaacaaaaaagaggtcgaaaataaataattaccggttgatcatttatcattccaatatatggcagtgtgcatttgtaggtgtttgtgtatgtgtgggtctttttccagtagggtaagaggttattaaactctaaaagggctacattagcataaatttacaagagctcttgttctggcggcatgacaaaaacctgtgttacctttgcattaacactgaattgcttgttgtgcttttggcaatgacagataagtccgtgtaattccccattgcaacagaaatgatgctccagattccaaacgcatcctgaagatgtcactgacaataatcttcaaagaacgggcagtgaaagtgggctgtatgtttgtaggatgatatactgcaaatgacaggaagaattatgtgagtgaagacgaatctgtaacatattattaagcaatttcacgagaataacagggataaaaggataatggatgagggtgtcattattaccttcatgtagagggaaagcaaaagcaaaggtagagagacaagattaattgaggaagggtgaagcattcattgctcatcagctcttttgtactctttgctcctgaaattccagactgaggaggggaaaaggtgctcagagctgcattttaatgcatctggcaaagagtaggatactgacaaggcactttttagccacctccctttttatcaaaatacacataatgactgttaccttttgaatgttccaaaatcacagcaaaaattcagcagaaggttttattctttgtgtatatatgtatgtgtgtttggcagctttgattattaattaagcttttaaaacccaaaattataaaataccaaaatggttttttccatgcattgccaaaaaattgctattttcaatttagagaatcacgttctgtgatgaaacatttcaaaatccattatattattattttgattagtctgaggacattgtgttaaaaaggcaatatattttataagcagtttttactctccattttctaagtacatttccctttcatgtagtaactggttttttttttttaaatttaaatatattttctctttgttaaatgaagggtgtgagtaattaaaagcttaaaatactaaattctccatttatatcttttttaattacctgtttcttataacttctcattgggccaattactccaaagcacatattatatcacacacaataagatgcaattataacatagcaaccactatccttctggttgcagaatggtggtaacacaggtgttttgctgtaatctaagaaaccttttggggcatgaaatcccttctgattataatttactcatgatacggagttaaccttaaacattgtagaaactttaaattatatatatgtttctgtgtgctggactagtagaaaaataaaatgatcatattacaagcttaaatatgtatccaatggagatactcactcaaagattaatttgggaacaagaagcctacatttcatccttgtctacatagcaagttcctatattcaggaaaggtaacaaaggattaagattcaggagtcagtcagaattgagacccatgcaaggctgatagccagataataatcaagagtgtaatgtgtatcatacacagacatgcatagcagtaatgctattaaatgctacacgtatataccatctagtaatgctatattttattgcatactgtctctctgtatgcctataatgttttatccttgtcattttctgattagcagaactagaatttccattttagttctataaatgggaaatttgaggagcagaaaattaaatgagtctacccaggtaattttatagtaaatgatgcttctaagaataaaaccatcttcagatacctcatccaatctacattccatttgctgtttgattttttaatttgttattcatgccacattctgttttttgatattttgctagttttgatatgtgtcttttaaattatcttaaatgtttcttcactaaaggagcatcctctgccttatcttttctgtagagtaagggaaaagaaactaacatttcccaagtacttaatatgtgtcagacactgttctaggcactttgtatatattatctaacttaacatagttataatagctaagtgagttagatatcattatcactgttttacaaaggacaagcaaattcagagatgtccagttatttctccaagctcacaactgggaagtgttagggattcaaatctaaattttcctggttccaaagatcatgttctttcaattactacatactcacttactcttgtctatcctatatcttaacatatacagtcaaaattatactgtctttttacatctatcccatgttttagatctccaaatgtctgtattcagtggcctttttctgcccacatattccttgatttctgcataacatttgacactgagcttccgaaatcctaaacatgcttccttgccaagtcctccgctccccttccctggccactcttccgtcggcctcgccctcaatattctcccatccccaaaggtatgtcctttcagtcacctccattctctgccatagagatctaattccttttcgtgctttaaactttcactgtgtacagataatcccaaaggtacttctctagtcttgtcttccttctacagctctatattcttagctgcctgctctgttgattagctcttagtatgctttgattatctcaaccaagctcataattttccttttttctaatttccttttaacttcccaattttaaaagatgtcgtgattctaatcacccaggccttattgcccatttgaattacttagaaattctttagctcagcatcagaagcctctcccacctctttagcctattggagtttatctcccatctccatctttggcagatcaaccatccttcaaggcccattatcagatatcatctttagtaagaggctcgccccaaaccaatcaaacgtgtgtatttctcacatctttgaatctccaatcaatttgtaccttctactatatattttattgtagtttgtcttttattatttctatagttgtctactcacttccttagacagtaaacatcttgaaggcaggaaccattgtatcttatacacatagtacttggaataaccttacaagatacttaataaatatttgttgaattgagttaaataaaattatctgacagtctcaatcaagtatttttaaaatattttttcttttacatgaaaaagcctttactatgttgaaatttaatattaaccttttgattatttgacactcttgaatgtattttctttcctaatttacatttatacattgcaatttattatcataatagttaccatttaatgagcatgtacttcccttggtactttgttaattccggatatatggaggtgagcaagtccctaccttcatgaaggtcactatttccttgagaagatactgctcttttcatatgacatttcataccaacagtcctttgtagttatatgtatgatatatggaaaaaattaaaaagagaaattagagcactttattatatatttagatatatcttaatcttaattatattaaatccttataacaactataaaatgtaggtactatttatccccatttaacaaatatggaagcagactctgagagtcaaaggtactttttccaaatcacaaaagcagtaaaatggcagagccggaaatggaattaaagatggtttaaagccaaagtctgtggttttccactgtgccacatggctctgcatatccttgtcttagcaaagagatgttacatgacaggagctcttaactgtaactcctgtatttgcctcaaactagaggaggcagggaacattagtcataattatgccagacgatggttagaatggtattacttgttaaacttagggaaagcataccccctgcagttttataaaaggaaggaaaatatctttctacttttgtgcaaaatgcccaatcaggttgagcacacatggttgccctacttgctagcagcagtcacaagatcccaattattgatataatttgggtcagagagaatgttttctgcatcctaccgagctttgatttggggcggtgtggggggaaggttgcaggatacctcatagaggctgacactttccactgcatgtgctgctgtgcagatgattataagagagcaattcttcattcaccataagtccaaatcaaacgtagaacatgacaaatagaattagttcctctcttccctttgcattaagcaaatttgatgcttcgttgtgaaaggaaaaagcaagcaaacatcaacagattgactaatacaattctacttagcctttcaagcaatctctcagactgcctcttatgcctacgtgtctctttatttattcttttcttcttgttttttaactccaaacttcctttatcaagacttcttttgtcttcctttcctgtaagctgtttttaaatgtattctttgttttggggaaaagtaaaaattttctgttggtttcacattacccaaatttcaaaattctagtccacatactcatacaaaaaaatgatactcctaagttttagataagttaggatttctttattcaatttcttgcatctattagatgattctaattttatgtttcaacttataaacttttaaaggtgggatcatacaagtccctttcattgaccttattactacccatcatggtgacatacccaaatgttcatatactagtgcttttgattataaagattttctttttattttcagattttctaggcattcatgaaatattagtttcatttattttttaacatagttttggccttgtaaatagcattcagtgtaatgtagacatgaatatttcttacagaagaaatgaagagtataattcatttattttttttaaattttaaagggatacataataattatgcctatttatggggtacatgtgatattttgatacatgtatacaatgtgtaatgatcaaatctgaataactgggatattacctgaagcatttatcatttcttgtattgggaacattttgaatattctacctattttgaaatatacaatacattgttattaactatagttactctgctgtgctattgaacactagaacttattccttctatctaactgtatgtttgtacccattaaccaaactctctttatccccacacctccttcccatcctctggtaactattactctactttcttcttctttacagcagtccccaacctttttggcaccagggatgggtttcatggaagatcattcttccatggacccagggcatgggtggggatggtttcaggatgaaactgttccacctcagctcatcaagtattagattttcataaagagcatccaacctagatccctcacatgcgcagttcacaacagggtttgcgcctgctggcccatggctcacctcctgctgtaaagcccagtaccagcccatggcctggaggttggggactcttgctctataagatcaactgttgtatatttgtctttctgtgactggatttgaagagcataatttaacctggtgatttgattaggtagaagccaagcctaaggtgcctactatcctagtatcactatagtcaccatgtataataatacttcagttaaaaaatgccttgagataaggcaaccatgtctcttcctataccagcgagattctaacatttcctctcattagcactgagaaagtttttataggataagggactggagagaggttgagaaggaagatgtgccagtgctgatgctagcgaggaaaaggttagagtatccagggttacaggagcatggtgccaaggacgtcatgccacagaaactctgagggacaccaaccaagtgaccagtgatctctctctcttttttccaactagcttcaggaattgattcccctatttctctcttccagtactattatagattactttcacccagggtttcttttccttttgacctcaaagaggaaaagaacacagtcttctggcgtctcacaactgtcctctccctttagccctcagactcctttaaacttctattggaaaattctaagtctttatatcacttcattttgagagcttcttcttgaaacttatgtatgacatactataaatgaaacttttttcggacatatctttactgatgaggaaaatttttcattgaggaaaaaatcttttattccctcacatgccttctttgtccatagagaagaaaattccactcaagcttttgttgttcttcccatgggaaggaaatttctgctctcattttccagagcattttcattgctgggtgttggaggccttgttttggtttcaaatcacactgaattgatcaagtcttcccaggataaccttgcaataagggaggataatattagatattaattttattaatatttatgaataattactatttaatattatagtcattactattaatttttatgaaaagttcctagttttacatctggttattgttcccctgatgtacatttccttagtcaaaaaccctgcaggaaaaggcaaaatgcgataggctttaagcagcaaaatttcacccacaggttctaattctgattccattattattacaagtatgaatattcaggaatcatttggttgcaagaaatagaactcaaactagcttaatgtaaaagatcatttattttaagcaataggagtagctcatgaaatcccatgacaagaacaggcagaacctgaggagagactggaactgaggattggaaagccatttgtctggatgtctccccttctgggccacgtggttctttgtctctgcttctgcttcatcgttgtttctcctcacagataagatgtccctggatctccccgctagaaacccaaaagtcactgcagggacattacagagactgcaattcactgctgctccattaccaactaaagttccactttcaaattccaaggagagggaatttggttggtttgcctcggcaacaaatgttcaccctggtctaaatcagctctggtcagaaagaagtagggacacacctctgagagtatgggaaagcttttttgagaaagggggcatggttggtacatacattccaaaaagtctctcccctttaactattttggttcctcctttcctcagtatactattcagaaagaagaatgcgcaacccagtttggagaaagataggaagattcttaaatatgaacccatcaacagggagtcagacagagaggagcaggacattccatacagatagaaggaacagtgagtgcaaaagtacagagaggcgaaccacttctgagaacagcagggattcaaggggatgtagagcagtggtatgaggggaacccagagatggatgctgatactcagcagcagcatttgctataggatgctgggggtggttggctgggcacggtggctcatgcctgtaatcccagcagtttgggaggccaaagagggtggatcacctgaggatcacctgaggtcaggagatcgagaccagcctggccaatatgatgaaaccctgtctctactaaaaatacaaaaattagccaggtatggtggcgcatgcctgtaatcccagctacttgggcagctgaggcaggagaatcacttgaacccgggaggcagaggttggagtgagccaagatcacaccactgcactccacactccagcctgggcaacaaagcaagataccatctccaaaaaaaaaaaaaaaaaaaaaaaaaaaaaaatggatgctggggatgggagtcagagtctggaggcaggggcattggtaagggttgccggaggttagaaaaccactaagatggggtccccaccctcccctgcgacggtaccagtctatggccttttaggaaccagggcacccagcaggaggtgagcagcaggcaaggaagcactgctgcctgagctccacctcctgtcagatcagcggcagcatgagattctcataggatcgtgaaccctattgtgaactgtgcattggagggatctagggtgcacactccctatgagaatctaatgcctgatgatccgaggtggaacagtttaatccccagaccaccccaccccctcaccccctggtccgtgaaagattgtcttccgtggaacgggttcctggtgccagaaaggttgaggactgctgctaagagacttacacagctttatcagtgaaaataaaaagaacagatgtgagaaatactgtggagctggaatcaacaggattagccaccagttggacgtagaaaggaaatgacaagaatatttacagatgagtcccaaatgtttagtttgatggctttatgaatagtgttgccatccactaagataatgacaaaaacttactattattatagtgaccaccctttctgagtacccattatatacaaaatactgtgccagaaacctttccatccactatttaatcactctattgtccccatgattgatattattttcactgttttatatataagaaatgaaagtcttcaagaatttaggtatgttgcctacattcatgtaactcaaggtacagagttaattctcatgcccatttctgacatcagaaccaccgtgcacttgggtttgtttttcttaagaaagaagaacagattttaaggaaaatagaagttcagtttggacttactacattgtgtttcctgtgagacattcagctggagaggtctagtggacatttgactatgggtctgcaacttatgagcagtctgggctggacccttcgatttgagagacagcagcttaaagtgggaattatgagagtggcagaaatcactcaggaggaggaagctgcccaatgagttactatgtaaagcatacgcctgcctctcctgggggttgtttgacatcataaatacactgacatacaatttttcaaggcattcactttcaattttaggaatcccttctatatcagttattatagccctgctttttagatttgtactttttctctctcttttcaaaaatatttgccagggatttgtcttttctgagaaccagtttttagacttcttaaattttcacttttaaattttctaatgatttttctatttattttagctatatttccctctgcttttttcctttgattttttttctgcttttttaagatttaaattgaattccaaattcatgaagttttctttatagttgtaagcatttaaaagtaaaaacttacattggctttctattttcatcacatttcatggtaatgttttaaatattcaccatttcctaaatgctctattactgtgttcatgcctaagacaatgacattaacccaaatgaatctaattggtaggatatctttggtaataaggtctttcttggggcactggaaagaggataatgtaaagcctcacattgctccctctagattctataccacatgttacccactcaactcagaatccataaggaagagctgtgctacagactcaaagaaaaagaaaaagattcatcctctcttttcgagtatgtttcaaaacaccaagtcaaatcttttggttaagttccaaaggaaaaagtcagcaatgaacattgtgatctgagtgaggataggagctcggggagtgcctccaagcccttgtactgcctttcccatctgtttttcactttctcccattcccccaagtacttagtagagttttccattaagctccactgaactgagccattctcagcaaaataactccacaggttatttattgcggttcaaataagttccaaatcaaattctgtgtcattgaatatcatttttaaattccttcaagtcagattggtatattacattgagtttgtcatatttaaccaacaaactaaagctaaacattttccaaaggaaaaaaacaaatgctgaaatacaccacttggattttatttaatattatttaaaataacattaaactagaacatgtggacataaattctataactaaacttactgatttatgtatcatagaaaagtaataaaacaactctcttctaaataaaggcttatttacacaatgttaaatggtcagaaatacagcacttaccaggatgttccttgtcagcacacaaggtattgcaagaatagattacctggatgaatgattcagaagccttttatctagagagtcaatataataaagataggacatagtgtattctggtccccattgtggatcctttttttaatttagagaactaaattgatgtcatttacttagaagaatgctcaataacaaaatgtattactttatccttttaaatgtcctaccatttttcagagaatatttaaagcaaactaatgcatatcagaaataagttatcttgttactgtcaaaggatattaaatgtagttgcttaatatatttacttaccttgctttagtgcctggtatatcaaaccattgaatgtcaatcaagatatgcattaaatcattatagagattagtggtaaatattactatattattaaaataaatttgaggccaggtgcggtggctcacgcctgtaatcctagcactttgggaggccgaggtgggtggaccacctgaggtcaggagtttgagaccagcctggccaacatggcaaaaccccatctccactaaaaatacaaaaaattagccagtcgtggtggcgcatgcctgtaatctcagctactcaggaggctgaggaaggagaatcacttgaacccagaaggcagaggttgcaggaagccaagatcgcgccactgcactccagcctgcatgacaggagcaagattccatctcaataaataaataaataaataaataacaaataaaaaacaaaaaaacttgagaaaacattcccatatttagagggaagtgtactctatatgggaactctgaggcaggatacttggtatcttagtcttttggggtcactataacaaaataccttagatcaagttatttatagacaacagaattttattgcttatagttgtggaggctgggaagtctaagaacaaggcaccagcacttttggtgtctggtggaggctctctgccttatacatggtgccttgttgctgtgtcttcacatggtggaaggggaagagggtttcccaagcctcttctataagggtactaattccttcccaaaggccccacctcttagggattacagattaggttttagcatatgaatttcagagggaagggagagacacgaacgttcggaccatagcacttggattccagtctcagctctcccagcatttagactttttgtgaccttgatgaaataagttaacagttctaagtctttccttcctcgttggtaaaatggggatacaaattcttgtccagcctatcaaaaagtgattttgtgatgcttaaagttgaatatttgaaaaatgtgtggtatgtatatagttatatattaagaacttctacattttgttttgtagatattttaaattattttgctatgaaacggtccaatcagtagaaaaaccaaccaatgtcatgtactcaactgcccaactttaacatttcataaaatttgatatatttgcttctgatcgtttttacaaaataaaacattaaaaaaatacaagtttttggccagtggcccatgattgtaatctcagcactttaggaggtcgaggcccgtggatcacttgaatccaggagctcaagaccagcttgggcaacatggtgaaaacccgtctctactaaaaatataaaaattttggtgatgcacgcctctggtcccagctactcaggaggctgaggcaggagaatcacttgaacccagtgtccttggagtgtcacttttccagctggaaacctctgtggcctatggtgccttttcccaagttttgcttgggcccactgggcttgttctgcccactcagcctggcaggctatgctaagcttgcactactggcccagatcccatgcctgccaagggcgagccaggcacagagtggtgaagaatgtgtgagcgagtgcatggtccggccaccgtgcacagccaggtgtgctggctgtggcagggcaggcagctccaggcactggcacaggtgctggctctgtatgagactaaggctggaacaggcatactgcaagtggcttcaatgatgggcaccgggaaatgcagtggcgacaagaagctggtagacaccaggaaccacagagccccaaagagagtatcacaaccatggctcagggagcccctaggtctgggctccctgaagggccccagctcttctcttcctctctccttctctcttctctccttcttatctcccacaacatggcaagcaggggccatgtttcagccctgtttgtgttaacagctctttcggtcatccagactaatgtccagcccttagcagagaggagacccataagaagtgtggctgagtcaggttattttatgggctcagacgggaggaagtacatggtgattggtccatgggtgaacgtgggcatgcctggaaaatgcaccatctgatcggccgaacggtcatcaatgaagtcttccctctgggttgtggatttcacccggaagtggcagtcaagcctcccggcttcaggccattcctggcttgaaggtggggtttcaccagggactctcccctttctgcccaggaacccgtctgcctcctgccatcagcatgccatccacagcacccaagctgtttatgctgagaggtgcctgcaggtgcatgtcgggttgccttcagctacccccagcctccctcctgagctcctgggtgcccaaagtccagacggggccccaaggcggcggagggctggcatgtcattgccaccccaagtacacacacacacccggctgggtcacagcagtgcccaggctcagccacagccttgtactgtaccagaacgtgctgggagccaggagaggccagggaatgggaacaggcacttctgagcctgcgggagctagggcttccagggcccctgagaacatagggatgcccaggtccagagccacagctgggcggctgtagctcagtaggaggcggggctcccacctgttcctggctcctgctgcattgccgaacacacaacttcatccgcaccttccgcgcatcagccggaggcttcccagcagctgttctagtcaggctgcctctgccatcactgggaggtgaaagttgcagtgagctgagatcatgccattgctctccagcctgggtgacaaagcaagaccctgtctcaaaaaataaaaaaaatataagttttaccccacaatggttccattttgttccctctttccctagaaactccacattattatatggatgcattatcctaatatgatcatgttcaatttaggcttcctactcaattttcagtttttcatatatgcaacaattttaccccaagcataagtacatccattatgatgacatttaatagaagggccaggccactcacatagattttcagaaacactgaatttagtcatcatcaagaaaatctgtaatcaaactctgtttgtctttttttgttctctttctgtgtgttgatgccaaacagaaataaagaagacattcgtttaagtgcatttacactgtaagaaagattgctcattgaaaatattgatttttaattatatctttgagataggtaaattaagaaccagaagcaattccacaacttgataaaaactacaattgtaggcaaatttggatgacaaatatgaatatttactgtattgggaataaggttaatattttaaaacaaggttgacaggagaaaaattgtcttagtttgcaaaaggaaatttgtttctttaagtgaaaattggggtcagtaggccacagctcttcttgcttttacatgcctgaaatgaattaaataatgcagtagcaaagcagtactgagcagactaatgacaaaattatacattaaggctcaaaatcattatacactagaaatacatattttatataagaaaacatgaaattttaaatgcattcccacttcacctccattatcttaagagagaaaaactaagtcatatcttcttatgttcattaaggaactcatggtctttttctagggagcaagggtggttactggattctgtttgctgattgtgatttcaatgtgattaaagacttattcttcatacagtagatgcagtatccagccccatatgctattcaaagtgagtatggtattattttatagagggtaaatctaattttgagttgtttacccttctttggattcctttatgtgaaataatgatagtaaataactttgttaaacatgtacttactatgttctaggaattgtgctaggtaccctacacccactctctgattcacaataccctttgaggcagacatgattttcaccattttatagatgaggacacaggctcagacaggttaaataagttgaccaaagtaaccaggctagtaagtggcagttattagatgctaacttcatattttcagtagtgacattttcaggaatgtattgcaaatatattaatattcaatccactatcaaatttcatgatttatgacttttaaagtaagtgtgagtgggagtctatttttagaaatcaaaatgaatagcactttaagtacactatgcacttgtgtacacttatacacatggagcattgtgtttggctcttttggtttcagtgccaatgccagtagttaccctatggaaaatgttagtgaaaaacactaaagtgtagtagaaagtacattttattatataagtaccgttttatatgtgggcatatagtaaacaatcaacctatgcatattacatataactttactttgaaagacatgtaaatagaacagagtcatactgtgacatatctatatgatgctcaaataaccatctgattcagagaagttatttcattagaatgtggtttttattacaacctttcactctttagtccctcgtgtcaagttgtatagacagggcccaagctgtcatgtcctcagtgggttgtatttatttataatggtacatttttcccagcatcacaaaaggcagaaaatttgttattgccatgtgaaaatactcattttgtaccattattctctttacacatatttgtcctcagaatatgggaaataaaattagcactactgctacccggtaatctttacaagaggattgtttttgaagataaggaattcaaatatcaataagctgaactgaaaacaatattaaatttccaatgtgatgtggcttctgtttggatagagatggagctggtctatgtttctttactctgtgttcatagtatcaaagtaagctttgtatctgtttttctgtaatgatgacatttacacttggttgcattaatatgaagtaacatggattgcgtgtgttagtaggttctttttaattactgtgtaaaaataatatgtaattgaaacaaaaagcattgtttccaatcctaattttttttcctcaagtccatcctgtcaagctgcaagcgtgaaagttattttctggtggtgtgattagattggggctgaaccctccagctggcaggcctgtctgtgactggcggcggcctgtccccagtgcttgtcatttcctgacatgcctgacaggatggggacagccgccccagacaggttcattagatggtgttttctacagctgggctaaaaataaataaataaataaaaagtctgtgctttgtaaaagcccaagctgtaggggcccttcttgttggtttaaaccagggccttgttttgacaaattttgatctgtgcagtttttagattttctgacacatttttgtttccttcccctttggcctgcactttgtgctctctgccttgttgctgcttcaaaatcctaacatagtcttcccaagagaaaaagaaccaccgttattgagggcttaaaagaaacaatagtgtaatacttcataaaatagcaatacttaatctatttccatggtgatctgcacaatggaggaaaaacaatcttgggacttgtgataagccaattacaagaaaggttaagagtttttttagtgccagaaacatgccatctacatgaaaacataggatcattactaacagtctacactgtcaaatacactgctctttagaactgccagaaatttaagctgtcttcatttttgagcttttaggaagctgacagagttttctgcctgtgttcataggcttcgacgtcagaaagagaaattacggaagactgtagaatacttgctaattaaaaccagaaataaattcaaaaatcagatttagaaatatgcttctttgtcaatgatagggcccctttaagactaacgatttgccaaaaatggagtgcatttgaaacatacatttctacagagtcatgatttatcattctcaaccccaaattcaaacttttagaactgcagaattggaaagaaaaaaaaaaatcttcagccaagaaattattattctgggttgcacctgtaattaaaaagtagctattgacatctgtgccttagagacttgccgtagtcttcctactatcatagttgctgatagctgctttccattaagagaaacattttatcttaatttttagtagatagaacatgcccaaatagaacatatctgaccatatttgtctaaataatcttagtgttgctgttagctatatttcctttcacatgtaaagatacaaaatataataatgtttgtatctcatatgctttgtcattggtgtaataagtagtgttgctgaaaaaaaatcaaattcctcattcacagaaatcctagcccttacctttcctttgtattgttagctttcactgctttagttccccgtctctatgacaactgtttaaattgggatgggcaactgtcatctggagtattactgagagaaaagtgttagtgagcacacagttcccatagatagagcatttcaatataatccaattttaattgagctccagagactttgatgtgctgcagaaggttgggagagagctattccagggagaaattaaagcagcccagcaaggcttccctactccagactgtcaccattttaagtaagcattagcatcagacttaacctgcccctatggaacatctcacttcttttttcagcttttcactgatttattttgccatatgtaaaagcaaagcactttcatctttttatatatgtttttacacccatttgattaggcttgaaaagcttgtactggacctgagattcatcttatgctgtctgttggactttgctttggcggctcataaaagacatagaaagtagagtagggattagcttcaaattgtcagctattatatattaaactttcttttttaatgctgctttgtaagaccctattttggagctaaaaagttgaaggaagtgtaatttgtatttagcttcgatttgtcattgaatttcattttaatgcttagattcatggtcatttattagtggctacgatttttatttcaaaatgcattaaaatatcttttcctcatcacatgaaaagtacctttcagggaaagctggttcagagcagctgaatacagatacatcaatccttaatagagaaaccattaaccctttattttttttaatggagagaaaaaggggtatttttccatatatattcaaagagccttttaaatattttgaaatataatgttgaacatgcattaaatatgctagtaataataaaaatgacatcaaatcacaatgttaattataattaaataagtactaaatactttgattgtgcagtcaaaaagctttgttacaggtatgataaacttaaggaaattatctatttgtgacatacttgacatttctgatctatattggcaccttaaagaaaaacacgtatttagaagttaagtaaaatatgacaataattagaaattagtttgagtctatgcatcattctagatacttctagtaccagaagtagattgactgtaaagctaatgaatcttcagccagggccccttactcttcaggccttggggatgatgggagttgctgataatggtacagtggtttcagtttactaagttgcattaaaagatctcagaagaatagaacctaatttctaaggcactagtaatttgttgagttttttttttctaattctaaatattcatgtgcatagcttattataaacaatgttgcagtgagtgatctggtacatatttcatcttgcttttctaggagtatattcacagcataaattcatagaaataaaatcaccaagtcaaagggtatatacaaatacaattttgatagatgctgccaaaattttcttgatatgttttattatttgtgcgcccactagcaatgtagtgagaacttgtttttctcacagtaagctcagtattagcaaacttttggatttttaccaatctgatagattaaaaatatagcattttcatataatgttctttctccaacaatgaatcaatttaatcatgttttcagtcaaggaaagccatttttactattttctgtgatttatctatttgagcttttttaaaaggaaaatgtcaccctctcaatgtctgtgggaggggattattgataaatagtatggtttgtctcatgcatgttatttttccatattagttaacataaaaatttataatacgtataatgaaaattatatgcacatataggtatgtccctttctccctgctcccaacctaagttaatttctcattcctcaatggaatttcctcctaaatattagtgtcatttgttctgaggataagaattttttttaatttacctgcatacccaagaagaatttttctgctctagcatagatcaactgccctattacctcaaattctagcttattacttataatacagttagctaaatatattaacactctgtttgctacataaaattctaaaccagaagggctgcatcctttataaattagttagccaatgtggatgtctctagtatatatttttatttatttactaaacatgcatattggagaagcatacactggcactccaggcagctgcattcattgagtacttgctgtgtgccacacactatactgagcaccagggaaaacattccacattaaggtggggttttgactgaaacacagaaataacctctatatatggagaaaataatattaggtttatttatgttatcagtggagagcaaagttttaataacactagatattttaatttatattttattcactggttatcattcctttaaagttgtcaggtgtagataggttaattgtttttattggtaacacattttctttgtggaagttcatgtttatgtgagtgataacaaacagagtgattgccgtatctaaagtctggactgaacttcttttctttttcataatactcgtaaatctgccagtaatcctaaacctaggaaatggcagaaaactcctagccactggagccagaaacccttgagactcctttcatacctttacctcagcacaaaacaaaacactctagccctatctgtctcagaactgtctgttcttccttccctcttcctacctgctgcaactctcttaagtcagacttcctctacttcctactggcttcattcagatttctagtttagcctcattccaagtcattctccatactgcttccagagtgctctttgcaaatgcagttttaatcttataaccaccttcctccagtgctctcaatggcatcacattcctcattagagctgccatctattgagggctaagttaaaatccccattccagttcatcctttctgcagtgagtgctctggacagcctcttgcctgtagacatgtgacctctgtacttggagtggaaacacctgagataagaactttacataccgtagctcatttaattctttcaacaacccagtaaaatagaatcatcctatcaatcttacagataaagacacaaatagaaaagctgggctccatgaaaggaggggccgtctctgtcttgttcacaatgtgtcccatcacctagcacaatatctggatcctagtacatgccgactgaattttttttgatgaacaaattatgtgttatgccaacaggctttgcctaggatcagagaacttgctcatgatattcaaatgaaacaaataaaaggcaaattttcagcaaactagtattttgcttcaaatagctttacaaaaaaagaataaaaactcagcagaagagaaaaaaataatcctggggcattccagaaatgcagaagaaactttttggttatatttaaccctggaaatactgttttcgttgcctgcaagtcgggtaatctctaaatcctctttttacccaattatagatatttgtgaaaggtactcatttgccagcaagggccatttactgggctatttacagttaaactgagttgcatttcttgaagagctaattttcctgtaatgtagaaaactggcggcagaagcaaaaacaccatgggaaattcagtaggtgcattgtgtagttgaagcatgaaggtgctttaaggtgttttttgtttagttttgttttgttttgttttttatgttaaacttcaaatgcagaagacagaacacgcaaaaccgtttagtaagtggtaaataagaacaaattccaggaaataatcagagctgattggagcaatgtgacacacagaaccagagactggatcagagaataaagtacactgaaaaggatctgggctggggtcaaggcagagactgctcccatcactcctgactgagggttcactaaggtctgggtaggggaggatcgtgaattcatttgttcaacacatctatgtagcacagcctttctgctaacctccccacttgatacttgctgtgttatttcatttaatactcacagcaaccctgcaaagtagatgtaatttgtcccattttatataagggaaactgtcacaagtgtattgggaaacttgcctgaagttatacaaactttagagtctgtgtgtcatcctccaagtccaagttctttccactacagcatggcatacagatatataaaaaattactttagtctacaaaactaagtgctagtaaagtacatacttattgctacatactggtaggatgagggaatgtggcaagggtaacattcatactgccttaggtagatacacagtaaaatagacccaatcaaaaggacttccaaaatgcaagtttgcctgcatgaggttatgtttcattctaccacttctcttcaggagacggtgatgctgagggagctgtagctttaagagaaagaaaaataaattctcatgaaccccaagcatgcacctgtgaatacccaggggcacttgggttttcaagtgaaaatatgcttcacaaactcggaacccatattttatgatagctttcagttgctaattgtcactgaaaaagaaaagtctttaaaacctgaaaaataattcacattcatcttttctttctggtccctgatgagcctactacctacctggcagatacttgataaatggtaaatattttttgaataaatgcttttttgagcagtaagtttttaatatatcatagaaatttaccaggtagacaaggaggagaagttattctagaacataaagtgtggaaatgtttgatatctgcatttgtttttttttaatttcaatagactttacttttttagaacagtttaagtttacagaaaattgaacagctaatacagagagttcctatatatgtgtgtgtattggtcctgtttttttccttcttcaaagaacagagacatgaaagtaacatctgataataacactttatattagaaaattgtcagctgcaagtaacagacactgtaaactggcttcgtaaaaaatagatagatgatagatagatagatagatagatagacagacagacagacagtcagtcctggattctggtggtctccaaggttgattcagctagtcgtggatgctgtcaaaaacccaggtgcattgcctgtctttactcagtgatccttggtttgtcctaattcttacgctgatagcaatgtggctccaacacttcaaaaaatcaacataagctcagaaatattcaaaggaatgagagagcatctcttccattggctccctcacagcatgtggaaacttttctaaatccgatatacccctggaactggccagggggtcagtgtgtcctggcttggaagtgatgtaagagaagtcaatacctgaacatgattggagttgtgtcaatcagggaaatggggcagggggatagggttggaataggaggagtggaatggtttctgagtaagtaagcagtagtgtctactatagagtttcttttaagaaagcataataaaatacaaatggtaaattttgatcaggccttctgaaaaactggaatttttttcagctccaataaaccacattttttctgtctccctcaatcatagacacccattgacatagcaccaattactctgtttatacttctgctactagagaataactatatatagaccctgtatatatacagggtctcctagcttaatcattaatagaagttaatcagaagaacaaaatcagaaatcagactctatatataccctttaattcaatcattcaacagattttttactgagtttcgacaacataccaggcattgtgctaagtaatagagatacagtaatgagaagaaaaaaaatggtcaaaaagcttatagtctagtggaggagattacattaaaaatgaaattatacaatgaatttgcaaaattacatttgcggtaagtgctgtgaagagaacttgtctcataggtgctatgagagcgtaagatagggtgattttacctagctagggaggtcagtggcaaaaatagaagcaaaaagagaccttgaagatgagtagaagtgaacttggcaaataggggagggaagatatttccagagagggaagaatatgtgcattggctctgtgacaggaaacaacatggtaggtaacaagggactgaacaaaggccagtgtggcttgacctcaagggcaaagtggaacctgattcatctggagcaggagacctgttgtgtgcaccactaaccccatcccatctcttttgttgttggctctgcttcctcagaacttctgctgccttatgatttctgttgactgctttctcgctgtgttctagcttcttcccactgtcctcttcaggccgtctctgaatatcttgaattcagatcattaagagagatcctctgattggaccagccagccaaattcatgatagcatggctctgatggttttaacaaccacagactgtagctaccctacttagataaccgcaggtggagtatcccttgtcgcaaatgcttgggatcagaagtgtttcaaattttgaattttttcacattttggatatatataatgagacatcctggggatgggatccaggtctgaaaatgaaatttgtttatgtttcatatataccttatacatgtagcctgagggtaattgtatacaatatatttgaaatacttttgtgcatgaaacaaagtttgtgcattgaactatcagaaagcaaaggtgtcactacctcagccacccatgtggacagtctgtggttatttggcatcattatcattcttcacactgaatttatacgctactgataagcaatcattttcttacacttattcatacataagtacataacagtaaaaaaaaagacacactgttaacaccgtgtaaaaacaatgtgttcagtgtaactaagcggcacagcagcatcacagaatacctggatcagctgttaaacagcagcaacaacagtcaatgcaggctttcagtctctacctaccatgctgggttttgattagaaggtaggaggttgtacagtaacccccgtgaggacactgaataaacagtgcgtcacatacctgcgttatgactgtgacctgtcacgtgaggtgggatgtggaattttctacctgtggcctcatgttagcactcaaaaagtttctgatttttgaacattttggattttgtgttcccacattagagatgctcaaggtgtacttttaatattagtactcatcgtggttcaatccagggtggtggcataattggtaataaacatggtacaaaggaacttttcagaagagggtgtcacccatgttccatctagtccataacaaattgggaatcactctggaatgttttaatatagctggttttaatcattatagaccatgtagattaataattcttttgcatatgtttcttattaaataaaaatcaagaaaagtattcataattcattagtgtgttaaattactgccatgtgctaggctctgtgctaagtatgaagaatgcagagacatacagaattcctgccctcagtgagtcaataggttagtgggagacaccaagaagtcaaccaacaattatagtttggtaagtattataaaaaggtgggtacagggttcccagtgggagcagcaggatctcctagcttaatcattagtagaagttaatcagaagaacaaaatcagaagggatctgccagtcagaagaaatatcatttgcaggggcacaaaagtgtgacagaacacggcacactggggagcagagaagtgttcaggatggttagaatttaagagctaggaagaatgcacattgtggctaaataggggattttatactactattaataataacatttgccactttttaaatacctactatgtaccatagtatatatgcttcatatgcataaattgtactatgattttgattttcatgacattaggatgcaaatttttaaaaaatgtttgaagctataatggattaaaattaaaaagtgcactagggccgggcggggtggctcacgcctgtaataccagcactttgggaggctgaggcgggcggatcacgaggtcaggagatcgagaccatcctggctaacacggtgaaaccccgtctctactaaaaatacaaaaaattagccgggcgtggtggcgggcgcctgtagtcccagctactccggaggctgaggcaggagaatggcgtgaacccgggaggcggagcttgcagggagccgagatcctgccactgcactccagcctgggcgacagagcaagactccgtctcaaaaaaaaaaaaaaaaaaaaaaaaaaagtgcactagtatttgtaatacatgcagttttcttcaggttaacataaagaaatgttaactagagaaaaaaatatttttaattaagtcatatttgactattgctacaatcattactgcaactctaccctgtaatcttgtttcattctggctgtatctaaaattttaatatgaaatacttttaaaaagagaaaataatttgtctcgacaatttataatatttgtaaaatcagaccctattacctaattagttaaaacaaaaacctctaacccagaaatccaaatgatctgaaacagaagaaaataaataagtctatagagagaagacatataaatataactagtttaaaaaattagcaatatgcagaataatacatagagaagttaatgtattcagtatagaaatgaaagtaaatactggaaactagaaattcgtttattttcagtagtatagagttctggtctccccacctcatccctttgtaaaataatagcagagagaaaaataaaagattttagactatgccaaatttgagaaaatgaggaaacatagccaaagatacaatatttacacaagaacattcatgagtaggacaaaaatgaagcaactgtgccagtatcatttttaattttgagagttttaccatgatttgagagtatgtgtttgaagatgaagtagacacagaggactccagctgcaactcagtttgtttgtaaattaaattttaaaatattttgctcaacaaaaattgagttccttctctgtgcaagttctataaggaatacaaaaatagagtacaactcagtctctatcctcattaagtccattttttaggggatgtatataataagatagatcaatttaaaaggacctgccacaatgtaagagatgctattggagaaatacaaataatgctcttttgagtagttcctggttctttactaatgaatataaaatacaattcacatagatttgaaacagtattgcacttctctagtccaaatagcgtctaccttgcagccacagcagtgatttctaaagtgccagtttcattgtctcacctctttctttgttaaaaatcttatagcagctctccattattctcagaccagagtccaaactctaatgtgagttatgagatctcgccccacatcctgctgcccactcaccctttgttgttctaattttatttttcacctctctgcttcttacaatatatgcacacacagtctgtgtccgttgcccccccacccccagcactgtgtttatgtatctttacatacatgtttacatatgtgttgttccttctgcttggtacttcctttttccccactcccctgccttttcccattatttgtgattttccaccaaactgtgaactcctagagatcagggactctgcttctcctgttcaccattggttcctaatggtcagctgataaatatttgttaaattaaaggaacggaagaaaaataaaattgataaaccatgaggacacttggtagaaaagagctgacctaattatgggctgtttataaaataggaagccttcttgcagtttatcactgcttatagtgagactggtagctggtgtcccaaatagttgggcttcgtagttaagagttaagtgctatgattccaataatgtctaggatacaaactaccactaaagaaacaataaatgtggcttttagttcagtaaaaggctatgtgctgtggtccagattttctacatctgttttggtgatgtcatcaacaaagattagaaccagaggtctgcatgggtgtgtgtgtgtgtgtgtgtgtgtgtgtgtgtgtgtatgtgtttgtgtctgtacacatgcacaaaaaggtagggagtaattgcagtagtaggctgacatttgttaagcatttcctgtgtgccaggcactgtgctgagcattttttgaaaagagctattaatatctcattcaatcgcacaatgaccccatgaagttaggtaccattatttctccccatctttagataagaaaaccaaaacatcaaaaatcaatgaacttgcctgaggtctcacagctagtaagagaggcagacccaggggaagccttaagtctaaggtaagcaggtccataaattgatgaattagagaaaaaaaatcaagattattaaatcaaaagttctctacggatgggctgcctatatttcccccaattgtaggatgttttgacaccccccccccaccgcatacccatatgcccatgtaccaataatggctgtgtttataatggcatataataacattcctaaacacagccattatagcaacattgtttaattttcattgaggatgtattttctggaaagcttcatttttccagcttcatttcttgatcatttttgtttgcctcacagttaagccatttccaatttttcccgttttcagttttatattactgaattattttcatcaggattaattcttttccatgtaagttttatggagtgacttggttctgtgatcaatcttttggtccatattacattttactgactatagtgcctgcccttgacaattttattttgatgatagtattcattattaattgaataaaaggctaaagtgaaactcttctaccagatatttgaagatttctttattgtgtaggagtggtctatagcagttgttctctaactttttttcaccaattttattataaaagaattttataaagctctataccacattgcacatgtttaaattaacagttacaattttccataattttaaatattttaaaaagacgtgatatccagtatgttctaaatattactattttaaaataaaattgttatattacttttcagatatatccagtagaataaaataagtagagtagtgattgattactattatcatctgttttaagatgtacaaataagctcttttttcaaatgaacattttatataatttctctctttgaactcatacttcctttcaattccttcccccaaatttacctaatctaaaatatttgtgcttgtgagtcttttttgatcactatgttatactactctgcaaaaagtgtatatacttactgattaaagctttagttttttaggttcctaagaccataacattctaagtatttaaattttttattctgaaataaattgttacaaatattattagcatacagtcatacaacagcataaatatattgtgaactttgaaaaataattaagcataaaaaatgaaattatattagaaattcatctcttaatgggatgaatagttaacacatgcacatatgaatattacttattgctacaataatacaggaatcaatattagagctacttataactttcttttttatagaggtgttgaaaaatcttgttcacataagtaaacagcatgtcgaagttgtattatagacagtgttattcagtgttttctactctttccaagttgtgtgctaaaaatcacataaggatctattgtcagaagttatttttaattatctctcaattgacagcccatttagatccaacttctcctctttgaaagtaaagaattgggaaaacatctgacttgcaaaaggatttttttttcagtccagtcactgggaacattcactttccaatgcctccatcaggtatttcgaatcatccaatttgatgctcctacccctcaacagatcttatactccagtcaatacaccatagagaaataccattttttattttattttttaagtgggagaatggcaatgtgtttttcccatctcctttttggagatgggaaagagaacctgtactatcttatgtttctccatttctttggtagggaaatagcatcaccaagacatgtggtgagaggtgggaagggagtgttccatagctgctccccacatcctcactgcatgtgccacacagcaggtatcagtcagacatggtcttccaggtggtcattttggaagtcaagcctctcccagtttgtagatcgactttccttcagggccttggaatcttctccattcagctgacagtttaaaaagagcatggatgatctcatatgagtgtggacctgaaatttcttttgaactattcttcttgaatatatttgctgtaatcctgagccattgccacaaattccaaatttatatgaaattataaaagtaatagggatttgtaactttaaattgcaccacaacaagctctttaattaaactgttgaggctgcaagtgtggattgaacgcgacaaccttaggaactctaaaaagggtttgcccagccttctgcagcattttcaacaattcgtaacaggaaattcaactggaaacaaaatttagatttttttcgtattcaaagaaaaaaaatttgtaatacttgtgctaatatatgcattagatgatttgagatcagcaaagctatcactaaacaagtatttttttaagttgcacaatatttagcttccttaaaaagaaaaaaaggtgaaacttttttcatctgtgatttgacagtcatttacatgtttctgacaacatatacatgtccgatacgcatgagtgcacagcagccttgtatttttcaacatgatcatcagataatatgtggtaagcacatatttgagtaggtggtttacaagggatttctatgacatttgtattgtattactttctatgtaccttactttctatgtgctttctatgtactttagttcataagtgaactaaaattcataagtgaatggggcagacttcagggtatgagcctgacatgaactttctcccttcacttcttttggatattaagcagttagctcagtatagttcagtggtcacttaagaaaatcacaaagttccataagatttggggtcaagatgctttaatattcttgcttatgatctgtatgatgtatcaaaaattatgtttattcagttctcaaaaatgaaactggatgggatagtatttgttgattagatttcattgtatattaaatactttgaagaaacaggcaggcacaagctagatgatatgggaagcttggcttaagaaagaaaacaaaaccacaaacctcaagtatacatgaaagtacttaaatgacagaaaaatatcttggactataataaaaagcaaactgaaagaattattatagaatgtccttaaacttatagaaaattatgtaaccagtaaaggtataaataaagaagacgattttatagtatcaggccatatttcaggcctgagcttgatgcccagatttttatagaaatgtaccataaactcagtattcaactgactgtgattgatattcctttacatttatgaaagttatacagattgattaactcatcacttgcctgaagcagcatcccctccggtcattctgcccccatcccactgcattccactctatcctccacatgcctccctagcgctgtgcctcaaatctcactctgccaccttcctgctaagcttcaggactttcccagtgcctgtgagcagagcagggtaacagagccctggggtatagtccaaggaagccacagtaatcacatgtatctgagtaccagtgttttatcttaacaattcattcatatttgcagtattttccagcctgtgctaattttactacaaaactgttttaaattgcttaccagaaataaaattgatgctcaagaaggggttccaaatgatattctttgacataccttagtatacattttcccatgtgagaggcgtaagtccataatatcaagtcaaaattgcttagcctaaagcccttccataactcctctggagtcaaggaatcctttcattgtaaaggtagtgtcttctcagaatggatctaatccagtcgaaagttccatggtagtgcaaattaaactactaaaaaagagaaaccagctgtatttagattactgttttggttcttgattaaagtcagcagggttgtttggtggactataccattaggacataaacatgagaagtctgaaggccacattggagagagcttcttctggtttagcaaaggagtcaaaatgcacatactctgtacaatttctttagaaccttccccatatgtactatttctatcagtttcccattgtgatttattaaacaaacatatatggagcacatatgtgccagacactattttaggcactgtgtatcgaacagtaaataggatagatgagagttctattctcctatttgatgtcacagggaggggacagacaaaaaacaagtaagaaaattaatcattttcatgtgcagaattaaacagtgataagataggctgtgtgttgggatcacttgaggtcaggcattcaagaccagcctggtcaatgtggcaaaaccctgtctctactaaaaatacaaaaattagctggttttggtggcacacgcctgtagttccagctactcagaaggctgaggtgggagaatcgctcgaacccaggaggtggaggttgcatgagaggagatggcattgttgcactccagcatggctgacagaatgagactccatctcaaaaaaaaaaaaagagatagagttacatgataactcttaaattgtgtgtcagaaaaggcagctgagaggagtagatctaaaattattattaatttttttttttttttgagacggaatcttgctctgtcacccaggctggagtgcagtggcatgatctcggctcactacaacctctgcctcccggattcaagcaattctcctgccgcagcctcccaagtagctgggattacaggcatgtgcaaccatgaccggctaatttttttgtatttttagcagagatgaggtttcgccatattggccaggctggtctcgaactcctgaccttgtgatccacccacctcaacctcccaaagtgctgggattacaggcgtgagccaccgctcccggcctaaaatttttttaaataaaaatgtattatggaatgaaactctttttaaataaagaaattgtaggatcatcttattccgtgatcagtcttgaaggtaacaagcagggaaagcaggaggtggtttgctataaaaaaaagaaaagaaaagaaaatgaccctaggctctatcaggttttcctagcagggaattatggctagctcagaacatcgtctttcatcagcccttttaggatttcagatgcttaaatataacatgggttattgtaaagtaattaggtaggttttttgaaaagcatataagaacatacataaaaataatttttcttcccatgtcccctttggtaagggctgaacacttatttaaatgatgttgccattgttcaaaatagctttggacctttggatctgtctttcagaatttgcttcctaagccatttagaagctactagcaaaatcattttcttttaattttgttatctctccttgtcctctttgcatttaagctttactgatcttaggttccttttttcttgctgcagagggtccctaaggaccattatgctcccaggctgtagctaagagaatggtgataggaaaactgagtttgtgtattagctgggatccagtcaggggagaggaatcagagtgcaatttagataggaaaagtgtgatacaattatcatataaattatgccaggagattgagtaacaagggactggctagtaagaaataaagataactctaaagaatattggccaggcgtggtggctcacacctgtaatcccagcactttgggaggccgagtcaggtggatcatttgagatcaggagttcgagaccagcctggccaacatggtgaaaccccatctctactaaaaatacaaaaattagccggatggtaatggcacgcatctgtaattccagctacttgagaggctgaagcaggagaatcgcttgaacacaggaggtggaggtcgcagtgagccaagataacgccactgcactccagtctgggtaacagagtgaaaccctgtctcaaaagaaaaaaaaaagggaattgatgaagccatttatgggaggtgtcccaacagaaacactctgctacagaacggctcggggtgagggaagtactgagaaaactgctggtcactgggtgctgggagcatcatgcgtcccagagccaagtgctggagaacaggcgcctgccaagtgagaacaccagaacagagaagaaaaaacacccttcctcctgtgtggtctcttcagtgccctttcctgacaaagtttaatgctatgacaggtagcaaaggaaaaatattttaaggacacaggttcgttttcacagagcaagcaattaagggtgaatttgcacatggaaggccataaatgaataattggcacagtttataaaatacagttttacatggtgcacttaaggagtcaaactaacatactttttggagctatctgcttgctataactaacgtaaaaactgataacatgcttaatggaaataaatgcttggtcaaattttcattacaccatagctccagaaggaaaaaataagtcaaaatatgactctgtgtgtgtatacacatgtgagatattaatatatctggacctagaaatatagatacaggtatctttctgacataatgctatgggtataagggtgccaacacagctttcatgggaagatctatcattttttctgatattatattcactttactgtttgggttttcaaatggccatagtatttttagtaccttagtgaaataattattatagttgaagatagattttgttgttgtggctgttttgtcttaaaatgtttcctacttgacaaaaaaaagagaattaatcctgtatcactatccctttcctttttaaaaatcatactggtctatgaaaatcaaatatggaaaccattatagccaactaacaatttataaatataaattgtggcaagtcactataacccttttgtgaaatgtacaagaagaagttttgcatttagaaatcaaaaaccaattgtcacctgatgctcaacaacaaggagacataaattcatcaatggaacttaatagccagggtcatgtactttatgttctttgtctctgcttaaactaaccatttccaggtatcattatcactgtttttcagatgacaaaaaccagatggagttaaataattgtttttcaaaatactgtagttggtaaatagcagagccaagagttaagtaggagtctgaatggctccaaaatgtttcagatttaaatagacgtctgactgcctccaaaaacctttcaatgtctagagaaagacaaaaactgaattaagggttacaaaatgggattttcaaaaaataaagaccaaaagattatacacttacatattttatgtatatttcctagagaaaggaagtgtaaaaaggaacttcataacttgttttcaaatgtatatatgaatataatgcatgtaaaatgaatataatgtatgtaaaactcagtaactgttttcatttccaccaaagcaaatataagtgcggtagagtataccacagcaagtagaaaagtccctctgaattgttaatacacgttggtgtatcaggaaggaatgtgcttgttgtagatttgaggacagtagcttaatcaaatatagattatatacatggtaaccagaagtccagatgtggatgcttgctgtgattgtttcagtagctcagtattagagccaaccttggccttcctctcatagttacacaattgctgctacagtttcagctatcatatctccattcaagcaggaagggcaaagtggtatgccagctatatatgactcatttcatcagcttttctcaaacatcctcaactgcttttggttttgatctcattaaccagtgcttggcctaatgtccttccacaaagttacaagggaatttggggaagcagggaataacattgtcaggactggcttagaccatgggtcagccaaactctgccctgggggccaaattcagctcatacttgttgtaaataaaattttgttggaatacttccatacccctttatttacacattgtctatggctcctttcatgttacaatggcaaaactgagtagttgcaactgagaccatatagcctgcaaagcctaaatatatttactctctggccttttacagaaaagtttgctgacacctggattaaaccaatcatgatcctttgcctggggttgaccatatggacactttgggggtagctgggcttccattaagcaaggaaggggagaaaggatattggaaagaaccaacaatatatgtctcacaggtggtcacctggtccaattaattatatacaagacccaaaagtgataatatattttcggttttaagtcacagagtctccttgaatatgtttttctactccttcttttcctcaagacccaactaagacactttagaaaggcagaaattttgcaaatacacagtatcaaattattgacaatgttgtgacagacagtgaattcatttctagttttctgacttttactaagttactgtcagagtagatcttaaatccatattttattgattgacacttccctttaaactgtttattttaggttcttgcatacactgagggacttcacggaaaatggatgttcagcgagatacgagctgtattttcaagacgttaccttctacaaaacactgctttggaagtatttatggcaaaccgaagtaagtccccttaatattttgaaagaaaatgtgctcatatttacatattattcatttacatggtatgataatgtcttgatttttcctactgtatttctgatgtgctctagcttaaacaaacagaaattctttttaaaaaataaaaaaagaatgaatttgtttgaaatgttagccctaggtttctcatggataaagttatactgaaagctgatttttcatgaagattcattagctttacaaataaatcatgataggcacttgaagatgacttgtaaaattgatggctaacttatcctgcggttttctaaactctgttttttttcttcttaccacagcctcagttatgtttaatttccctgatcaagcaacagtaaaaaaagttgtctatagcttgcctcgggttggagtagggaccagctatggtctgccacaagccaggtaattatatcatattacatattatctatggcttgttaacatatttcaatctcaatattacagcaatgtaaatgtggttataacattataattatttcagagaccaaagaattttctttctctgaaggttatttgtagggatagagattatgaaaatagctattttgagaatgacagaatggttagggcagatttttatttaatacatataaataacaaagtaaaaaacttgattgcttatcacatagctagcatataattaagacattcttgcttgttaaaatcttacaggaaacataccaaaagcctgaagatcataaatgattaattgctatgtaatagcatataaataatgtttttataaatgccatatataaatgcttcttaattaaaacaataaaaccctgagagtttattaagggtaatagtcattaattatggtatagttgtaaccacatttcctagattttcatcttggtattttagaagaatcattttgaaatcttatattattaaaagatactaatgtaagtagaaaacataatcagtagttacttatattgctgatatcagtttgtcgtttttggctcgaaataactgaataccttactaaaagtggcttaaactataggggtgtgtgtgtttaatataaaagatctggagttaaggtgctgccagtattggttcagaggttcagtgatgtcagaaccctgttggctttgtattcacaaaatcaccgctacttcttcagctactacatcttcacacaactgcattacagtaggaaaaagacacaaaggatttctctttaagcttctctgttttaggaagaatgtatttctcagaagcctaaagcaatctttatcttaagtccctttggccagaatacagtcaccttcccattcctaaaacaatcactgccaaaaaggtgtgagttctgttggcttagcccaatcattccctaggttttatggaaaaagatacctctgattctttgccagctcctacatgaacaaaagaggatttccgttgatgaagaacaaagggagattgactttaggtagatacaacaatgtctaccacatagactgttatgtccttgagaattattacacagcactgtatggatggaaaggaaaactaatctttgtctatcctcccttaaataggctacagacaactgaaagacagggactgtgttttatttatcctttaatctacaggacctaacacagtgcctaattgcagcagtgctttttaagtgctgtttagctggggttaccttgtattgcaacttatctattctctttaagcttacagtgtaagaccaattcactgacacgtatacacatgctcaagatatttgctagtagaatgacaagattaaactaagatattagtagataatgaagcacttatataaaatacaggtcaaagaaaaatgcatttcatctatcaaagaaaatgaggttagttctgcaagacttgttcttattgaatctaagctgactcataataatcattacttcctttcccaagtgcttacatactatttgtttaatcatcaattcaagaatttactcaggaattgacattaagaacttacgaatgggcctaactttttcctatttaagaataatctcctgtcttctggcatatttctcaatgaccatgattcctgaaagattactaatagaggtttctatatggcatgtataatttccctcagtattctttgacttgtctggaccggaattcatttaaaacaatcagaagctcttttattttatttcttacctatgatgagtattgtttcccttttaaccacatttggtctctttttgacgtttggaagatcattcttttttttttctttgagacaaggtctcactctgtcacccaggctggagtgcagtggcgtgatctcagctcaccgcagccttgatgtccccaggctcaggagatcctcccacctcagtttcccaagtagctgggaatacagacatgtgccaccatgcccagctaatttttgtattgtttatagagatggggtttcaccatgttgcccaggctggtctcgaactcctggactcaagcaatccacccacttaagcctcccgaagtgctgggattacaggcaacagtcaccatgcccagctggaagatgattctttataagaaaactgaaaacaaaaggcagctcagtagttttggtctctctgtaattcataatgccattctatcttcaaacgtccttttgttgtccttggcttattttcccccaaaaagctcaactaattattagtttcctaataatattcttacagactcagttttatgtacttccctagatatacatccttagaagtaccaagtggcaatggggaaacactgcatctaggcttaaacctgtcacttagctgggtaacaataagcaagcctcacacttagtagcaattcaataaatattggtggaaagaatgaataacactactcaagcagaatgacattcttatctaccataaaatggggaaaatatctttacaagagatattctgccagagatattttgcaagatatctttgcaagagatattttgataatcttttgtgctatgtacaagacaatgcctattaagattccatgtgaatactcatgttaataatccatgagtaacagaaatagccttaagtctgttgttcccaaactaaacacgaaggagtcctgcgatatcacagtgaattctcaggggtgctgcaggtcattttttaattttttagggaaaaacagcaacatttgtcagataccacacaaactatttgctcgagttagttccaagtttcaacttagaatgattagatagggctgcatctttttcagtgacacctctgagaaactggtgtttggtggctactgtcttcaaaaacaagagccatatgaaaaatcagtgtggaacaggaaatgagtgtggtggtgtcagatctgattccaaggtttcagaagctgtgcagtttccaacagacatacacaccccattagtaaatgtggttatttaagaatgaaatataaatatttctctttaagtttatgagtattgtattttcaaatagctactcagttgttaagatgttaaatatttattgagttgttagagctaactacttaataaacagaattgtaagatatttctcttggtcaaggagcactatgaaaaattatggagatactaagggtgccatgaattgaaaaagtttgagaacctctgtcaatcagtttaaaaacccagtagctttatcatacttttctaaatacaactgcttttgttatttttagatgaacacattgaacctggaaagtttcataatttggaccaatgatcatggtttattcccttaggctgttcctatgtcccttcttctggacccatgcattttttcaaagttcccagttgtttatattttacaccattgcagggatagatattgtacgggcagaggctgtgcatgtgtacacactctgtgtgtgtgaaggcaagtcgaagaagttcattgatagacattaagtcaaatgcatgtaaacaggtacctgactacctacctacctacctaattaacatggagcagatttgctgtattgtttaaaagctacttgatttatcttaagtatagttttactttttttcttgtggatttgtgactcatttgcagctgtgatttgacaaataaggttgctttcaaattgttttatcctgagtaattaagtgtatcttctctataatagaattctcaaatattgctaatttctacaattaaaatatattttctaattcatctaagaaggataaaccataaattattttaagttgattatcaaagcaatatattagttaatattggattttttaaagttatgaattaaagagactatgtttgttatgctgtgcttaattgctaggaggatatcattggccactcctcgacagctttataaatcttccaatatgactcagcgctggcaaagaagggaaatttcaaacttcgaatatttgatgttccttaatactattgcaggtaagatgtctcattctttaatctaataatatgtttatgttcatcaaaatcatggtaatgtagcctgatataatacatttttctctttggaattcaaatgcatcattagagtaaattttgaagcactcacattaaattttatcagaaactgtgcaagctcataccaaacttttagatgcatttattgttgaagaggcttttccttgctttccttctgccatttcctttgctgacagctttgtctgaaggtttattagagtcaacaaaccattgccagagtgtctggaaataataatgggaaaagtaatttcactactttgtcattctcagcaatagcagctagacaggagaataacaacaggattctgcctagtacagatgtcacctggaatatggcatgattaggttacagcatctttttttcttaaaatcttcaaataaaaatacaaaatcagattacattttctaaattatgagtaactgccatcaacctttgcagtaccatgcttgcaaatcaaaaggaggtagtggctttgttttctgctaaatcagtggttgtcagtggttaaacatgtctatgagatttaagtacttcatcttttttcttaagttaagctccaaaagcccttattcatgatgaattacaaagagtttacttctataaaccaggctctacaaaaagtttttgcaattagatgaattcaaataaccacataaataaaggtgcttaccataattattgttttgttatgaatgaatgctcacaaccgtgtatttagagctgtgtacttctctgaatcattactttaaaaatataactatgtaatattactcttttttaatctatcatacataagtgtgactaaagatactataggtatatattaaatgcgggtaatatagatatgtattaaatagacaaaacttgatttgtccacaaaagggaataaagctatttgatatattaaaatgctttttcactttaatcccaatacattcatgtatatatatgttcatatatacatgcatttattcatatgtgtagtacatacacatatatatcttgaataaacctgtttactccctcaaagataaaagaaatgtgttatactatttaattagcacattatttataaatagaatgaatttaaacatctgaaatgtaaagaacttaatttcatgagcatatttaagtaaatagcatggtgtagcagaaagaacacaactttcaacaccaaagagaagagggagagaatcccagatctgccaactttctgtcctggagcataagttgaattttaacttttaactctatcgtggacttttaatattttaatagcaatatttaatatgtttacatctgttttaataactggtatgtttggtcttatatcatcttgtcttatacttttttttaatgtcctcttgctttttatattgtttgttctctggctttacgaatgcttttttgctcagtgctcttgtgatttaaaatgtaagcaccttgttattaattcccctagagatattacatttttaaaagccttataaactatttttcttaatttgaactcaaaaatcaattaacatttttaaatcatacctaagacaaaaacttcaactcaattttatttctcattcattgcttatattcgcaaatataaattactagccagaatccagattattattaacttcacactctggggtctacgtctttttgcaaattaagaaagatttcaaactattgaaattatgtgttcatgcagtatattattttcagctatatggatctttacctgatttttcgggatgatattctctgtacgttcttgtgtaacagttttccatattccctgtattaggtttttatattatctgctcttgagagacctatcaagacagtatcattagacaccattaggtgattttttttcccttggctgtgctagctatttggagctgttggatataaaactggagggcagggtgatatacctcacttgtagttcagtttccaatgtagcaggcattcatattaaatggttttcctattctaaaatgagattttctccaggctctggatggaatgttttctagttcattgttttaaaggtctcttctagtctccatcccttcccactgcattttactcatgtaaggtcagtttcccacagtgtggtacagtaccacctataactaccacccacttcatgcctgttactttctgggagtctctttatctgtccaactctggaaaggttgctgtgtctaaatctggatagagataacattgtcatgccttctaaaagttacacctgagcagtatagagcctaatatgcttttttctatttgggacaatctttgggtttctgagccagagcatgcagactctggtgggaatttaaaagcatcttgctattattgtttgaatcgttgaagtctgttttatttataacatgaagattatatgggccactgatttttttcaaaaattactgggtacttcctttgcaattattatgactaaacatgaaagcctgactattgtaagcaatgggataaaaattaacaatagggactaggcacacagaacacttacagtctagatgaataagtgaaatacacgtaaataagacattttaagatggctgatagtaaatgctgaatcattgctatcgtgaatgctgcatgagcttagcagaggggaggcattttaaaatgtgtttggggagaaaaaaagagaagagcttcacaaatttctgctagttgtatatatatggtgtattcagtggacagaattatcataccttctgtggagtagagaattatatataatattggagccttagagaagagccagattataaagaggcttttaggagtcagtatagtgttagagtagaagggaatgcgatgtggagttttagaaaaattaaactgataattatgtatggcataaatcaaaattgagattccttagcattagtgctataaggggagtagtaatagtaaattgttactgaatatttactatgtaccacatattctatttttccctgactacagaagcaagtaaagtatggtttctgcctttgaaaagatcgtaatatagtgaggaagcagacgtataccagtaattccactaaaaagtattggaatgtataaaattgtgtacaattttataatgtataaaaaagtattataatgggagtatatgtgaagccatttgaggtagtcaaatctaggagccattatttataactaagagagcagaaaaagcttcccataggtgacatttaaattgggaattgaaatatgattaagagttcactagaaagtaggcagagggcattccaagaagaaaatgtgaggtgaagattttggatgagcatatggcagcaggtatggcaaaaagagagtaaatgacactttgtacaatatcattatacaaaaaagtttcactgtcatttgttctagttcagtggttatcaaagtgtagtcccctgacctgcactattaccttggagacctgttagagatttctgatcctcagactcctcctcaagcctacagaatcagaagccggcaacctgcctttcagcaagccctctagttggttctgatacaaaaagtttgagcacaattgcattagccatttaagacctaattatcagggcaagatttgcatataaaacatttaaaacatagaagaaagtacaggattaagtgccattcagtgtaataaaagtttagagaagtgagagattaatatgaaatagtctactcgaggaaaccttggaaaagatgagctttaaatgaactctttaaggattttgtcagatgtagatgactatccaggcaaaataaaccgtaataagtagaatgacaattgaaaaaaattatgaatatgaatatcctgaggtactctccctggatatattcctattaatttaattcttcctttgctatcatcctgaaattttaaataggagtgccagtttaaactgagcaccagcattaaagacatgggtgatggttttcttagagaagcttcagtaatgccatgactgaatacttgttagggcagcaattagatttgcctgttttcctgattggtggacagtgtgtatccattcatctcttcttatcaaatcacccttcagagttctcttatgatcctaaaataaagggtgctctaaagatgttaagttgtaccagtatcactttaacgaacacgggtcctaaaaataatcatactattttataacactgttttagggatacggttattgttcaggaagtatttatttcatttgattgattgaaacttaagatttatcatttctagataggatgttagtcttctttttgacaaatgtaatttcttaggtaatctaaagccaagacatggttggcttatattttgtcataatatgttttaaacatttttatttgatatcaagattcagaaaaaaaatagtattgttattatgtctttctttcatttttcctattgaaacattccttggccgggcgcagtggctcacgcctgtaatcccagcactttgggaggccgaggcaggtggatcacgaggtcaggagatggagaccatcctggctaacacggtgaaaccccgtctctactaaaaatacaaaaaaattagctgggcgtggtagcgggcgcctgtagtcccagctactcggaaggctgaggcaggagaagctgaagcaagagaatggcctgaacccgggaggcggagcttgcagggagccgagatcccaccactggactccagcctgggcgacagagcgagactccgtctcaaaaaaaaaaaaaaaaaaagaaacatttctttgttaataataagaactcagaaaaaatagtaaataatagtttatgactattgaataatttataatgtgccaaacattgttctaaggactttatatatatttgctcatttaatcctcacaatagccccatgagttaggttctgttcttatccccattttacagagatgaggtagagagtagctaaataacttggcccaagtcatagggctaataagtgacacagtcgggattcaaacctaggcagtttagctccagagtcttcattcagttactacagcgtactgttccaggatattcctggtaccatacaacttcacctccagtcaccagctttaacttattagctgcttttaaaacctaaataattaatgatttaaaacaattttgtaattttcttttacatttcatcaaattaaccctttgaaatttatttactgtcatgacttttgtagatactgatattctagtactagatctgggcctggaattactatctttaatgtagaagctggcactgttttcagttaagctttagatcaagagaaaaagactctgagacagagatttgcttgaggatttttattgaaaagcccttgggatcaacatctgtgggggagtgaagaagttagaactgggcagaaggaggattcagacctcagtgcagttgtgacaaaggcttcagtagatcccacagggtgcctggggctggggtaaccgttcaaagttgtcttggcttgaggcaagggagccaggtcttcattacctccactctgcaatcattggatgcagactcctgggaaggagacatgactggattgggggctttcttctaatggtagcaattcttcgagatggacatagctgaacaccaccagccatgaacaccaccagccatcattgctcccagcatccaccataccagcagttctcagacttcagtgtatccaaagcaggattgctaaaaccctgatctttggttccctactgccataagttctgattcagtaggcttggattgagccgcaagaagctgcatttctaagaactccccatttgatgctgatgccattgatctagggaccacactttgagaattactgccctatatctatatctttaaaagacatacctaaaaataattttattaatcttcatatagcaccgtcagtatcacacatgatgactcttatgatagggcatccttagcattttatgtgcattttatcttcccaatgagaaaaaaagttttgctcagtaaatacccatgaaattaagttacttaatatttatttttgtaaatatttgcaggatgttgtgatctattatgtaaattcactagaattactggacgagggattctttaaacgtcttggattaaagagaagtgttacagaattggaatctggttgacaagatgaaacaatcttttctggcttcacatgtttaaaaatataggtcaatgtgacctaataaatttcatattttctataaatattatccacaaatattctataaataattctaagacttagattaaaacagtaccaaactgtacattattattacactctcagatttatcttttttcccaaaaatattattttagtatgaaatgcaaagtacattttatgacccatttcttaaaagtgtctcatacttgaccaatttcacttttctcctttctagatgcttttaaaaataagattctgtataaagcacatggtctcagtatcatagtattaatgcattatgcagactttttacaccctcctgtggtatgtgtacatgtgcataattgcatataaataaacacacatttactgtatgtaagttttgtaaagatactttacatagaagtatcttgccaaaagaagcttgccaaatatcccggaaacgtatttaaaagacatctaaaatcccataaatgtgttcttaggctttgttttattctatttataaatttaatgaatgttcattatagaaaattggaaatacaaaaaatggtaattttaaaaattaaaccactcaaaagtctaaccgtaaatatcacagttgacatttgggtgatttttctgtttttcattctctgtgtgtggtgtgtcattgggaacctgtaatgtatacaggtttgctttctactttttccatttcactaaatattctttgaaggcatgacttttaaaactacatgagagtccaacctagaaatatggcaaaatttctttaactatttttgaaacacttgatttttttcaaagaacattaaattttagatgattgtgtaaaataatcttaatgatacttagagttctactaaaaatgtggtttcaactttcagttcccaaattgacctgatttctgtttgttttctgaaaaatacaacctatgccttattttataccttgttagataatattatgcaaaagatattaaagcctgtaattcttgcattttaaaaaataggagagtaaccgctaacacggctttgtgtaaatgatcccctgttaaacttgagaattttttttaaggattttgagttgtttttcatatgatcagctaatgaattcagcacaacttctccaaccccaacctttttctcctgtttagcattttccacttttttactctgtgatgaacaagccctccctggttaattatgtatatatttagcaactgcatgtgttgggcttattattgtcatctaattagatgtaacttgaactgcttgcttctagaaaaatcattaaaaattctttcctaatgacctagagatgacaaaatgtctgtaaagtgtgaagaagcagacaagcacaggaacatcgctcttaaagagtgttaatccagatgctgccatcatctaattaaacaatattttgctgtcattaacattttcaccaaggaattgcagttataatttctttgtcagctgtctctagatcactttaccttcaaaaccaaagtgccatataaaaacattaaattggatggtttaattaaaaagtttttttaatgaagaaacatatccagtgtttctgagatctcatttactgtttcacttttattatttgagtagattagtgtcataggcttgcggtatttaatattcatcttccaagataaattcttataagcatagttagcaaaataaagtgtatgtgtgtgtgtgtgtggagatagatagatagatagatagatagatagatagatagatagataatctccacacacacaaatatatatatttacttaccactgctggaaaaggaaaggaccctaccaattatagcaccagtgtatttactaaatatcaactatcctaaagaaaaaacaaaacaattagtaattaaacatctaggtatgccagagcctcatgagtattactttggaaataactcattttttggatgatttaatgaacagtattttttttcatttcacaaaggtgttcagtaaaataattaaaggagtaatactaattcatgattaaaacatatcaatgcaaaaccccaaagtgccacttcatcactctttttttccatgtaacattaaatacattgtgcatttttaattcaaatcaaatacatatatgactgtccattttacaaggctcttatgcagaaatttttattaaaaacaagcattaatgtcatatttatttataaagtttattatatttattagaattaaaataatgctataaatctctgctaatttaaaaattactaaaattttctttttagcacttattttcaaaggacctctcaaagattattgaaagtgaattacaaaaaaaaatgcaggacagaataatagacatgaaatatggctattggcatcattcattttgtgtatacgtgtgtgtgtatttttaaataatgcttttcttctttgtatttttttcctaaaatagcattattttttttttaacttttattttaggttcaaggagtacatgtgcagattttttatagagataaattacatgtcatgggtgtttggtgtacagattactttgtcacccaggtgataagcatagtacccaataggtagtttttggatccttaccttcctccttccctctaccctcaagcagtatccttttctttcttagaaaatcatttctattaaaaaggctggtgtcttcaaatatagtctacatttttatgctgtttgcattgacacagtacatttaaatactgtgtttatgtaaattggctttttaacagttttccttaatatataaattataaaacttcatcagaaattattttaacaattgtggttatctgattttcatctatcaattaatttatttaagtaatatatgttatatctagataggtagcatcagcattattctattaaaaaaatatacactggaatacttgcttttcattaaaatctacagatttttaagtagaacagctcccccaagaaaatggaagagctctaaactctgccatggacccatttaggatcccagaaatagctctgtctagccaatctgtactctttgtatatatacatataaaaaaagtactgagccctatcaggtgtcctaggttagcatacatatgaactattagtaataaattttcaagtttagaattgtacagcttttattttacaatattggtactgttttagcagattattgtcatgtcaaaagactttaatatggctccgaactcttgtttaatctcatcattagtattattcaccatagacttaaacacaagcaggttcattgattgcttgagctacctagctgtagatgttttcttctcgtttaatgtagacattcacaatatcattctctctcatatatacctctacgcctttgcataatcctcgtcttctaaagataatgttctgcagttttcctttacttgacttatatttgttcatcttctgaaatttgggtcattttattccatttttatcacatgcatatccattccatcaacaaacatttattgggcagatggcatatgccaacacacagagattaaaacaaacaaacaaacaacccagccctgacatttatgagtttacagactggtggagaggcagagaagtaaacagcaatgtatatcaggtgtaatagaggtctgtatgagaactgtggtgaggcaacacaggggaagccctaacctagctgtaacctcatcccagtaaatgcaaagtggaagcaacattctgctgccattacccacacctatattacatacccacacctatattacatacccacaccagtttatacatttaaagcaatatgcagtttagttgtaaaatgcaaagcttcatataataaacagataaaatagtcatcaataaagtgttttctaaatatattaattaatttggtttggtgcttgcaattacagattttggttcttactcagattgtagttctttttttttctatttcacagttatgttttccaaatgctgtaagagcagatatcatttaatgtaatttcctgatgatgaacaagataatatctgcatatctatgctactgtgatagtacatgtggtgtgtgcaaccatggcatactggatgaaactcatatcactaaataccagtgaaatagctgttttgtgtgaattttaatggaaatttagaaaattactgataattggatcataacgcatttttataaaaaataattttgttcaacaaaagttttcttaggatcctgtttctttaatagctattctcttaatttcacctgatcatgttttttcagtttcagtttatgagggggggccgcagcttgctcccctaaactttccccattcccactgtgcctcaatatcatacctgaaatatttaagtcattctaccaaaacataagcagacatattcaccctaagatcgagcagttcttcgctaaagtgaaacaacataagacaaaaaaatatttcatgaacttaaggagtgaaaaaatgtatgattgacatctgcctctgtagtttctcatcctagcttcagagtacttctgtccactcgcaaattctctgcattcattcttgatataagtttaacatagtattctgtgtactcataatataatttctagatatatattcattataatagaataccatcacagccaggtgcagtggctcaggcctctaatcccagcacttttggaggccgaggcagatggatcacaaggtcaggagttggagaccagcctggccaacatggtgaaaccccatctctaccaaaaatacaaaaattagccaggtgcggtggcgcgtgcctgtaatcccagctactcaggaggctgaggcaggagaatcgcttgaacccgggaggcagaggttgcggtgagccaagatcgcgccattgcactccagcctgggcgacagagggagacaccatctcaaaataaataaataaataaataaaagataaaatagaataccaccacataagctgcagatgtgcaggtcagtggggtgacttcctccataattactttcagggcctctgactggcaaggctctgcttccggggttgcaatattatctacatcagcagaagagagatgagacacacatgcaggaagtttcagtgggccaagtcttgaagagactttgctcacattctgtagatgagaactaaatcctgtggccagagctacttgtaagggaggctgagaaatgtggtgtaacacaggaagaggagaatcaattacaataaccagccagtagcctctatcacagtcttataaatagtaattctagttacgtcttaaaacaattattgagtgaattcccttgaaatgcattgttatcagagttaaagatacggttcaataaataaaaagttattttcttctgaaattcagtagatgctttgtaaaaacagaaactatttcataagcattttgtgtgtacaaatttttatttctgtttttctttactaggacggacatataatgatctgaaccaatatccagtgtttccgtgggtgttaaccaactatgaatcagaagagttggacctgactcttccaggaaacttcagggatctatcaaaggtaacttttaaatatatagaagtcagctttcttcataaggctatagtctaatagtatttctgtcagagtatatatagccagttaatgtttgtaagaaggtgaaactgattatcttgacttacatagtcagtttctaaatcttaccaattcttagcacaggaattaagctacaagaagataaactagtactagcataggcaaaatgaaatgggtatttgagaaacagcagatgtagagagagttttctcatatatcctaggctttaaagtcaaggttaaaaacctaaaattagtagaaaatatgatggcaaatcatttatgtgatatgttccttagatggtaagacatttatattgaccataaaatacacacattgtagggaaatataatactgaaaagaaagtcagttaattttaccaagtgtctgtctatatatgagagagaagatatggcccaaaagatggcaagaaaatggtgcataacggtaatgagaaataaaaggcaaaatttttattagctcacctcatttgtccagaggaaactacagtgtgatactaaactgtttgaaattcagtgaagaactgggaactaagcccaaaaagctgctctatagtctaagcttacgccagaggcctgccttaaagtttatgtatgttagccatagtaaagcctcagcccattgacttggaatgtatctctgttttctatcagacttgattgtctgatttagcaatccacagaaagttgaaaggtatttgtgtatacatttggttttagggggcaggtttaaggggctaattgacaagagcagcataagccctgtgatttagggaaacaacattacagctgatttaaaattaatcccacagatggtttttaactcagcatgcctgcttctgccccttttctggcctttgaaacctagacgtacctaagttgaagttctatattgcactagttactagctctgtgacctaaagctagtttctcttgtcccatttgtaatatgagaataataatactgtcccatgtcaaatagttgtacagatctaatgacatgtacatttaaaaattataacatagtacttggcacatagaagcacttcctgagtattaagtattattgttacacatggaatatttcttagcctcttttgaagactgtttgctagttttttcatgttcttatgcgtcattcagtatccaattcttttattttatataactccctattaaattttagttgatagctcatggataattttagctgtggtattatagatgttaaagggacctaaaagatcagttagccaacatcttactgagagtcacacaactggtagaaataaattgctagcaaatgaattctaatacgcttgcaaatatagtaattcttccaaggtgagtcaaccaaaaattcttaactatttaccatattcaggtaactaaattatttaagataaggtagatagaagcattgtaattcatgcagcctgcccttcaggaacaaatctagttatagattatctaaataataagatcagtcccccaaaaaattaaaaataaagtacaatattttagagagacccacacaagagataatacatgcaggttgagtatcctgtatctgaaatgcttgggaccagagtgttttggattttggatctttctggattttgaaatatcaatatatacattatatacttaccagttgagcatccctaatctgaaaacccaaaatccaaagtgctgcagtgtttccattaagcatcacatcagtgcttaaaaacttggatttggggcatttgagatttcagaattttggattagggacaagattaggaacaagaactctgcagctagactgcctacattcaaatcctaattctgccatttaccagctgtggagctttagacaagagtattagtttctctttgtcttaatttcctcacctatataatgagacatcaataataatagggttgttgtgtggagtggtggatgggttaataagcataaaggacttagaatagtgcagggacatcagtattagctaatgctatgtatatgacaataatagagtggtgaatcattgatataggccatatgctttgaattgtgtttcaaataatgatgatgaatatatgctactacatacatattggatgagaatatttgaatggcatgcatgacttgccaaggttgaagtgtaattttggggtgtaaaacaaaaaccaaactaacttattgatgtgaggatgaaaactgtcaaactagttctttgacaaaatcttgtctgcatgtattttatttaacataaattgaatagccattacttagacattataaaatatatatacgataaaaattcagagtatagattctcaggtagcatattacaacctcgtacgatgactactattatggctattgtattatttttaaaacaaggaaggaagttctttttatttaaaatcaactgggatgttgtgtttaaaggaaacttatagactgaagctcctttttttctctccatttatttattctttcagttgttcagtcaacaaatatttatcacacatgtgctatatgtcaaacactctacaagtgaaagagtgtacaggagtgaataaagcagacatactcccagccacttgaagggagttcagcccagagcaaaatgaaaactcagatagttaacagtaatatgagaggccagcatttacaagataggtatagtagggactgtgcctcactggggagtacaggctcagactcactaagacatttggactcaaatgttcttgaaacactggcccagccaaagaaaatgtggcactcattatgattagtatgggttatagaaggcatctggtaacatatttgctggtaatcatagatttttttcatttatccatgtaggaaaaaatgagttaaaataaatgaggaagtcactgtttctacagtaactgaagatataaacatttcaaggttttgtttgtttgtttgtttgtttgtttgcttgcttgcttttgagacggagtctcgctctgtcgcccaggctggagtgcagtggtgcaatctcggctcactgaagcctcctcctcccaggttcaagcgattctcctgcctcagcctcccaagtagctgggattacaagctcccaccaccaaacctggctaatttttttgtatttttagtagagacagggtttcactatgttggccaggctcgtcttgaactcctgaccttgtgatctacccacctcagcctcccaaagtgctgggattacaggcgtgagccaccacgcccagcccatttcagggtttttatgctaatctgtgtaatgtgtatttcctttggcagagcttttccttttgtgcctcacatgtgctcctctaattttatatagtgttaagtaaataatacaggtaaacagacggagcctaaataaattaggcaatgtgactacaaactgtagttttgcaagcatgtagttcttcatgctgtgaacagttgaatccatgagctcttaaaagataggtagcttttcttccaattttactatattctatgctttagcaatttgttctttctattctgtcaccctagcatgataggaaaatgttagcaaattaaagcctcttgatatgttaataaattactcgtgcattgttcccatgcttcattgaatttcttaataggagcttcttacaaatgagctagaaacctgagactatcctgtataaaatccatcaataaacaagattttaatgtatgaaaatatatctttttatatgcctaatgggaaaatgacatttgaagtataataatataattggaaggaaaaactactatagtgcaatattatcacaatgaagagatgtccactaagaagcacatgaagttcttgtagttataatcaataccgcaaatgaaaattttaatggagagtttcttactcttcagaagctcaaggaaaaattgaaatacttgaatgatatgaccaagaacattctaaaagatctctaacaacaaaagtagttgtttctaaacaaacactgggactcctgatcccagtaataattcttagcagtgaataattctagaatttgtttcaataaacatgtggtaccccaaatactttttatattccttactatatgaaagaattaagaaactatgaaatgtacaatgccaaaaaaataaatatttattttctttctttataccaccacattacacaggcttcatgaaattctgtgttgtatcagttgggaaacttctgaatgaaagtttcagaaaacacagctgaaagtggcttgaacaatagtgggaattgggagaaaaagtcaagaggttgtaactggaacatgaaaagaatgtaggcttcgctcaaatatttgtttctgtgtcacatattgtgcaaatttaagatgttttctaaattctctgaacttgttttctcatctttaaaatgaacacaatcatacttacataatagggttgttgaaagattttaacaccgtaaagtagttaaggcacctagtataatgcctgacacagaagtggcattcagtgagtggcagtgacaaagcaaatttccataattgtcatttgagagttcactatctttggtatgattgacaaaaacctactgaaggttatttgattcctctgatttattttttattctagtaagattaaaaattaatgccatttaataaaatattttaattcaataaataattctgttttatcatctatttgagttatcaaattatcaaaactgtaacatcaaaacactaaggttatattaaatgtttattagaactttaggtgcacatttatttagactgaaatattttatatttataatattcttacttgttctttggcccacttaattgaacattcgaagagcacaggagcaaaaaaaaagttctttatcagtaagattttttagacctctcatttgattagacatcacaggttcaagttttatttattatgtgtacaggttaggggctatgtttattgtttgacatgagggtcaacagatgaaacaatctgcctttgacctatcttttcaacaccaaccaacagtaggtttagagatttcctccccaccccatttatataggtattccttatggagatgtaaccttatggtgaaatctatcttacaacatgatatatgctagggcttcagttatttacatatactcatatgaactcgactcttaaattacagtggttacatgactttgatgtgaagcacagtctctgctcattaaagtgtaaatagaattttcctatttcccagtcatgccctctgataagtgaaatagtttcatcacaaaaccaagtcctactaatattgacatgaacataagacatcacatacacacacccattcatcgagtggaaaaaatatattttgttaacacaggagttgtttgactgacagatgatgataagcataaccattttcccaaattattatgccacttaataaaaggaagtgataatgccttgaggctttgaaatgtgataatgcaaatggatgcactgaagtgtgaatactcttcaaccatccaccctcaatacttccaaatgtctatctaccacacagaaaagagtttatattggtaaggtggggaatgcatgactcagcaatctagagcaagttgggtttgttgttgttgttgttgttgttgttgttgttgtttttgagatggagtctccctctgtcacccaggctggagtgcagtggcatgatcttggctcactacaatctcaactagagcaagtttctgtggttattttatctttctttttcactgtaagttaacaacatctaaaatgaaattaattccatttacttgatcataatctacctaatgcttaattttaaacaacaaaatatgaagtatgggcaaaactactaggtgtgttagtggtaggatgatacaaaactaaaagataaaagtgtaaatgtgtaaatataattatataccatctgccaaataaccctgctgccaaatttgaaataacttgtttcaatgtatgttgaatgctgccttaacatataatccacactatgttgaaaattgttttcattagacttgctaatatggcagtgctgagggacaaggtattgactggcagtgtttggatactgttttaaactcatgagatattcatttatttaaattaatacttttattcattcactcattctttcattacacaagcatttattgccaacctactctgtgccagacactggagatacaaaggcaataagacttagttcatacctttaagaagttacagtcattgtttacccagtgacatattaagctgttctccttctaattgaaaaaatggaagaaccaagaaaagtgcaactaaaaaggtagacttcacagacactggtaaccagaaacagtgaagtgtttttgtgtttgtttgtttatatctccagtgttgcttgttggagacataatagggtgacagggagctttatagatttatacagaacttccaaagcagtcctaggctctgtttgcttatactaaatgtctctttatcctcttttcttgttccttcccacttagccagctgaatcaccctttcagaaaaagagagggaaaaaaatcctatagagcctgttttgctttgaaaattttaggctgttaaagaagaaactgaaaacagcaggaacactgtttagtgtatgctcttagaagaatcctacctatggaaaggaaaagagagcctgctttatgcactttaatttcaccagccacatgtcacctctgtgtctaaaccacagcattatcatgcaaaactaggccaaattcagtctcctttaacctttctttccagctgaaacaaaatattaagcagttagaagtgatcttgaaactaatttgtagccccatcattatccttctacttaatacctggaaaacttctagaactaacacatgaagatttaagatgctctactgtttgtaggtgaaagtatttacttttcactaagatatataaaactaactttcttaggaactatcttgggataatgataataataatagccaatattttgcatgtgtttattatatgccaggcattgtgctaagcatcttacatggattttcttgctttaccctcacaacgctatgatgagttgcactggttatatagattgcattttcttccattcgttacctattatttctccataatacataggtaggatattctttaaaaaaaaaaaaaaagctagtgattaatttctcttctagatgccctctaccttttctaagtgccctggcagtttttatacactatcaaaaaaaaagaaaaacaaaagaaaaaaaacaaggaaagaaaaagaaaaaagaaaaactctccctattatccagtaagaatgagttcttttaaaatatcctgcacaatgctcagtcatgtcagatatgaggagaggagtcaaaagaaatgcggtcagtgagccattccacacctccaaagttttcagtcctatgtgggactagcattcctgtgaaagtgcctaaagctggatgtggtggctcacgtctgtaatcctagcactttggaaggcagagtcaggaggattgcttgaggccaggagtttgagaccaacctgagcaacatagccaaaccctgtctctacaaaaaattaaattaaaaaaataaagtgccaatagatttttttttttttttgagtttcgctcttgttgcccaggctgaagtgcaatggtgcaatcttggctccctgcaacctccgcctccagggctcaagcaattctcctgcctcagcctccccagtagctgggattaaaggcgtgcaccaccacgcctggctaatttttgtatttttagtaaagatggggtttcaccatgtgggccaggctgctctcaaactcctgatccacccgcctcggcctctcaaagtgtggggattatcggcgtgagccaccatgcggccaagtgctaatagattttgctaatcaaattgcaactttagatcaaagatgatctttcttcataatatactcaattccaccctatgaaaaactataaaaagaaacacatttaattaatagaaaaatgtaatcttaacacttctctttattatcgtttcatgacttcaggttctgttccttaataatgtatttgaaaattgtgtactgatttgctgaagttcatctgatgacaaaaggccatattaagccaattaacagtataaaattgcaaagggaatgtttaatccacacttacaagaacgtaattttaacatattttagagaaacaaattttcaagtcatttaaagcattcttatttagaacaacccaaaacataggaaagacttggattgattggaaaggttttgtttgtttttgtactctattttaattgattttgactttactatgaaaatttttaagcaaagaaaaagtaccaattcctaataacaatacccattaaccaatacctacatgttataattattgacagtttagcttttattggtttactgaagtatttttaaataaattaaatatatcatactttacccctaaatatttcagtgtgaaaaatagtattttcccatataatcagatcaccatgattatatctaacaaaacttatgacagttccctaatattatctaacactgtgcctataatcaaggttttctaattatctcccatgtgtcttaaaaattgttttgcttaagccaggattcagtcagcgaccacacagtacatctgattcttctgtcttatctgtctaaaggttagaatagctcccagccaccctaacacccccaccttttttttcatgatattgactcatttaagagagcatgccagttatcttatagaacataacaataacagccaatattttgcatgtatttattatatgccaatgctaggcttctgaatttgtctttttgttcctcgtgttgtcatttaactcgctgtaactagtaaggttttgatgtacgctgattcaaatatcaatgaagattgataatagaagttttttgttttgttttggtttggttttttttttttgagacgttgtctcactttgtcacccaggctggagtgcggtggtgcaatcttggctcactacaacttccgcctccgagattcaggcaattctcctgcctcagcctcccaagtagctgagattacatgtgcccacctccatgcttggataatttttgtatttttagtagagatggggtttcatcatgttggccagactgatcttgacctcctggcctcaaagagatctacccaccttggtctcccaaagtgctgggattacaggcatgagccactgccctggccaataatagaaatttatatttggaaatatttggtcaataacactagccaaaatataaagttactatagttaatttaaatttatcaaagttaaaatgttcacatgtgaaatatatttctgggtcatataattctaaaagccgactaaaattatctctatgagataaaccaaattcatgattaaacagcaaaaaaagagtatacagggaagactaaagtctccacattctcactgcccagagacaactgttgatatactgtcatatatattcttcaaaaaataaattatacaaagtagaattacttgatcaaaactatatgattttttaaatgttaccaattttccccacaagaaatttatactgatttatttgccaatagcattatgagatatcatgttttccaatactgagtattataaaacttaataatttttgacaatctagttaataaaaatagtttttgtttgacattttaacaattgtgagtgtacttacgacttttgattacatatagtagaaagtcaacttatactggctttaatttaaaataaaaatttgattagcccatataactgagaaatccagggatgggtcagttcaggaaaactggatccaagtgcccaccagaattatcaggatccacacctctgttacttttctacattggcttcattctcaaacaggcttccctgtgttacagtaatgatgtctttgtaaccccgctagaaaaagagagcttttcccagatagttgcagcaaagtttcatccgatcaagttgaattacctgtccatttctgctgcagtcatagtgccaatgtggataaaatattatgattgacaggtctagatcccatgcccacccagggagtcaggtagcgaggtcagctcacctgcaccaggtagaccaagagtggggaaggaatggttcacaaaggttgaaggcataatgaatgctaaacagaaaaaaagaatatatatccattacattgtaggaactggtactattttttcttatatatattggaaattggcatttattattctgtgaattgcctattcatcatatcatttcctcatttatttaattagattgttcattagcttcttattgatttgtaagagcacatttttaaggaaactagctcttatgtgctatgaatatttttcactttgttatgtctttcgatttttgcataaaatttttttctaaaatttccacatggaaattttatataatattatataattgggtcaatcagtcttcattcatttagcatttattgctcgcttaaaaaggttcaggtactgtaggtgtgagaataaagagatgaataaaagacagggagtttcttcgaagggctacactactgggttaaaaagatgagaaagttgcctattaccagatggtgtcatgtaaggctttacagatgcaatttgaaaaacctccaaaataatgagttgaagttccttagataaaaagggagcccgggaatttacttgagcacagaagtgtctgtaggtatgatttctatgttgtcataacagaattttcagaatgatgacaggtagttcatgactaaaaaacaaaaaaggtaagaactctcaaagcctcttctaaggattttcaagcccttgattacaaaagataacacgataacttagatatgttagcagttcaatgtcttaaaagtattgagataactaaaagctattgttagaagccagacaaatgagtcaaatatacccagcttcaagctgtatctagcacagagctgcagctggttctgtaaaacgtctagccactgactagcaacatgatcttcatttgacttttcttcagtgtactcatttgtaagagatttggtcaagtttacctgaatgtttccttccatttctgtggatctgtgaggaatgaggaattaagtaggaaattatgaaagaaaaaagtcacatcaagggccgggcatactggcttatacctgtaataccagcactttggggaggccaaggcagaaggatcacttgaggacaggagttcgagaccagcctgggtagcatagtgagattccatatctattgaaaaataaagtcacattaagatcagaatttcatatttagcaatgaaaaagcagtgcagtagtgtggaatgtggagacccaggtacctgtttcctcctcatgaaattaggttcgtattgaatgccttgctgacctcagatacttatgaaaatcagtctagaaaatggatgtgaagacaatatgttatacaaatatatagtatcatcagcagttgtaatagcagtagtgaactcttgaacattttatgtgtgcaggtttgagtattccttatccataatgcttgggaccagaagtgtttcagacttcagattgtttcagatttcagaatatttgcatatacacaatgagatagcttgggaacagatccaagcctaaacaaaaaattatttcatttcatatacaccatattccatatagcctacaggtcatcttaaacttttttttttttttaacaattttgtacatgaaatgaagtttgtgttaagtacgtatgtgtggaattttccacttatggtgtcatgttggcatgcaaaaggttttggaatttggagcattccagatgtcaaacttttggattagggatgctcaacctatgtaacagtagaatcctagtaccatgaacatcattaccattttcagttttttatgatatattagaattcagtgttattgacattgctttaactaggcctctgatttgtccttgacaaacttttttttcttgaaaattataatgtagtttggtgacattgaccattcatcagatcaatccacatttatttatttgtatttgtttaaatcaataactctgtgctcagacttttatgttctctaaaagttcttctgatgtctcatataataccatttatccaatatgttttatttatataatttttgtggtcatttttacttactaaatttatatattttatacctgtcctaagaaaagggcttggtacaatatgcaggtttaaaagatagaaaaatattggtaaatcaaggctaagatgacagaaagaggaaacagcaaaatgaaactaaagaaaaagttagcatgcagaaatacacatcaaatacataccagaatgtttcaaggtacaatctaaggtattgcatctaaacagttgttttaaaaacaaaagaagtatgtatttcccattaaaaattttaaaaaataagcactggaataaacacatttaaacaattatatttactatagtatttatcagagccttaagatcacgtaaatccccacaaacatctggtaggatttttgtttcatgtaataaagtcacaaaggtttttatttttaggaaaaccaagctttttgtggcactgaagtttgagacagatttctctctttggtcttcaaaacagggaaactgagtgataagagtagagaaaattctcagcattatttcttcactaactacagtagtgtttcatgtgaacatcctaatgctacacatgtaatttcccgtagattttataaggaatgtgaatttttttacattagtcacttctttgattcttcaatattggaaacagtgcctttttgcaagctatgtaggctttttagcagttttaaaaactgaattataataataaagttttatagggatagaaattttatttttcatttttgcattttttgcaccattttttcctatttgttaaagtgttcacctgtaacataaaagctaaaaaagacaaaacagcaataaatctaaaaacaggctttaaactttcagttaaacttttgtatatggtaacacttaaaaagtgcggaagtcactgtatccaaatgcccactgtttgacagaaaaggacactatttattgatgtagtaactataatgaaaattgaaaaatattgcaaagtaaatttataaattttattaagtgtagccttaccttttgaccagaattcttaccatattcatctgccaaaatcagatgatattgacattgcagtatttgctaaaatttttgaagtatagcaaacttacaaccttgtcagtatgtaggtaagtaggtaattgattgatagatggataaatatgatatgataggtatctattaggatctcttaagcaaatgtcatctatgacaaaattcttatttccccaaacatttggaagctttttgctttctaattatttattgctgtttgactgttagaagcaaaatgatagaaaaatattaagtacaaagcaaatcacttgcattatgtttcataaaagtaatttctaaccttattaggtaaaaattcaaaattagaaatacattttaagaagttactaatggaggcatatacagactttaatactgtgcaactgtttcctacaaagcattactctgtaaaacactgcaataacatgactttgatgaaacttgtgtaaaataaaaaatataagtatttacttttccttttccagaagtgtaagagaagattgaaaaagattagaggaagagacatgctcctttttaaagaatgttttgtgagattttacaggacaaacagtatcagttaagatcaaaccttagggattgcacagacattttatgcacgtgagaggtctattagcatattcacgacagaacaaagtattaaacattttcagtgctttgaaaaatatactcagtaatgggatggctgggtcaaatggtatttccagttctagatccttgaggaatcgccacactgacttccacaatggttgaactagtttacagtcccaccaacagtgtaaaagtgttcctatttctccacatcctctccagcacctgttgtttcctgactttttaatgattgccattctaactggtgtgagatggtatctcattgcggttttgatttgcatttctctgatggccagtgatgatgagcattttttcatgtgttttttggctgcataaatgtcttcttttgagaagtgtctgttcatgtccttcgcccactttttgatggtgttgtttgtttttttcttgtaaatttgtttgagttcattgtagattctggatattagccctttgtcagatgagtaggttgcggagccataaaaaatgatgagttcatgtcctttgtagggacatggatgaaattggaaatcatcattctcagtaaactatcgcaaggagaaaaaaccaaacaccacatattctcactcataggtgggaattgaacaatgagaacacatggacacaggaaggggaacatcacactctggggactgttgtggggtggggggaggggggagggatagcatcgggagatatacctaatgctagatgatgagttagtgggtgcagcgcaccagcatggcacatgtatacatatgtaactaacctgcacaatgtgcacatgtaccctaaaacttaaagtataattaaaaaaaaaaaaaaagaaaagaaaaaaaaagaaaaatatactgagttagaaaaacatatctgaacatctagtaaagtataaaatatgtgggtaattttaaatgaaaaactcattactttcggccaggcatggtggctcacgcctattatcccagcactttgggaggcccaggcgggcgaatcatgaggtcaggagattgagaccatcctggataacacagtgaaaccccatctctactaaaaatacaaaaaattagctgggcatggtggcgggcgcctgtagtcgcagctactcgggaggctgaggcaggagaatggcgtgaacccaggaggcggagcttgcagcgagcccagatcgcgccactgcactccagcctaggcaacagtgcgagactccatctcaaaaaaataaacaaataaataaaataaaaaaataaaaaactcattacttcaattccgtaacagaccttacattcatttcactttatagcaattacttttaccaataatgtaattatgttgttttaaatattaagattttatgtaatgtttaacaaaattacattcccttttttacatctatctaaagagatttgagagataatgaaatttaacacaataaaatttaaaccttagaactttttaaaaaatctaaatttttatactgtcatactttgttttacaaaatgaggacaaaaaagtttaggaaccttaaaatattaacacttttgtgcgtgaaaaatacagcttttatataaattgttgagtctttgttaatcataattaaagttaacaaaaaatgaacataatttacaagtaatttaaatattcaggataagcacccttgcaaataagagtttattatggaaattctaacagactttttactgctgatgacctcattgtgttatttgaattagtctcctgaggccaaaagaaaaggctcataacaatttataaatgaatcttcctctcttgtgtaacattatgtgtccctttgaaacactaattttctactacttctcttgttaaaattaagccttcgagggatcttcatagttaattataaatattaaattttgaaataaagtagacattgtacttagtactcttgttttctctgtaaacatacttaatttatagtatgcaacttaaatcaaaataatgtgcttatttgataccataagcacggactctgtataccattaatccaaaatcagacaaaaactgaagctaaggcagtttgctatttgaaatcatgaagatggtatgctggaaattcctaatgattagatgtgctaaaattttgagactgtgatgcaattaagcacatgctttttgaagaaatcagtatagggattagcatcataatcagtaaatagggtggtggtactgataggagaggtcttagtggcctcagcaaaatgctttccaaggaatccgaatttcctggattattccatcacccttaggtgtgtagtttaacagtaaaaaggatagttgttccatctatatactaacagaatgagactaacattctatcaggcttccatatggagggttgtctttcacactctgggtaactggctgttaagacaaggttttcactaatatggttgtcaaatggtcaatctcttcaccttccctccattgggtttcctgtattccaagctaaattttcattatgtagcttattaagtagaaggaaaataacgaaactgttggtgtggccttaacagtttaaactagatcacctctgataatctagttaacaaaaacttggtaaagtctagatactttgtactatgaattatcctcttgggcagtttataacaagtgtaatgatttgtaattaatatcaaaatccagtatggttaaaaatgtaatacaaaataatgtatttatgctgtatggctaaaatgaattaacagtgaaatactgaaagtataaagatttattatctaggatatctaatatgactgtattaaacaaaatattttttttcttttaatagccaattggtgctttgaaccccaagagagctgtgttttatgcagagcgttatgagacatgggaagatgatcaaagcccaccctaccattataatacccattattcaacagcaacatctactttatcctggcttgttcgaattgtgagtatcttcattgagttagcttgcctttggtaccttaaaattttaacataagtaaattaaataaaaatcaaatcagttgtaatttgattaacaaagattagagacgagtgaagtagaaattaaagatttcaaagtagcaaaatatgaattttttttattgagttgtctcatttgcaaaattggattaggaagatagttatctgttgctaggtattatgagcttaaaccaaaccagttgtccagttataaaggagccaaaattgagtacatacctttttttttttttttttcagtgagagggtctctcactctgccactgaggctagagttgcagtagcactatcatagctcacagcagccttgaacccctgggctcaaaggatcttcctgcctcagcctcccgagtaactagaactacaggcatgtaacaccttgcgcatctattatttttttatttctcttctttttttttttttgagacagagtctcgctctgttgcccaggctggagtgcaatggcatgacctcggcttactgcaatctccgcctcccaggttcaagtgattctcctccctcagcctccagagtagttgggattacagatgcccaccaccacgcccagctaatttttgtatttttagtagagacagcgtttcaccatgttggccaggctggtcttgaactcctgacctcaggtgatccacctgtcttggcctcccaaagtactgggattacaggcgtgagccaccacgcccggcccagctattatttttaaacatgggatctcactttgttccccacgctggtctctcacttttgttctcctgggctcaggtgatcctcctgccttacctccctaagcactgggattacaggtgtgagccaccacacctagccctggagtgcattcttaatacccactgcctcctttctcacaaatgaggcacactggcacttgctctccccccctccctcattctttcttcttgggcagcatgttttaaaaccagtttccaaatgttttgaaaacctctttctgttacttttctctttctcctaggacataaatatatttaagtctcactgaccttaaaaaaaaaaagcctcctgccagcctccgcccactctgaagttctttcccatctctctccctgcacagtcagattcctgaaagcacaacctctgctgtcctgcagtgcactgtggtacctgttgcctctactttatcacctcccattcagtctttagcctggttgatttcagttccacatccatcactttactgaactgttttggggaggtcacatattatgcagatagagcatcccattttttacctatcatgtctcttgaagcatttcacgctattgctaatctctccttgaaattttctttcaagttccttttacaataccctctcctggtttgcctcctgtcatcctaactgttctgctcagtctcctgttcagattgtttttccttaatgttcctcttctacaggatttttctttatatttcagctgagctgtgtcattcagttacaagctagtgatttccagcttctctcttctttgcaaacatttctcatgggttcctgacccatatttccaagtgcctactagatatttctacctgaacatctcacagtaccataagcagcatttcaataaatgaactcctcatctccctcatgtacctgctgtggttaaatgccgtgattattcactcagctgcccaatctagaaattgggaagctttttcctagatattttctctgtctttccaacctcttacatccagtcagacatccacagattctaccaactaaatatctctatctccttttctgtatactgtggcactttctttaatttagattcccattctctctcgcctagagtattgccaaagctcttaacaaacctcttttcctttattcttgccttctccattctggtctagataggagcactataagtgactgaggagtattgtagaatgctaaattaaatctcttaatcaataatttttccccttattaagatatacctcagaccactctattgtatggggctgatgtgtccaagaaacacattggtaaagcagagtatatgaaactgcatctcctgtcttcgaaaatattttttcccttcacctaaatgacagctctagtttgtaggtcttccttaggcattctctccattatggggaaaaaattaactttctacagaaatttagtatgaatacattttaagtaacttggaaaccactgataggtgacaaactacaattatttttgttaagaaaaatgttgtcagaattatgattctgtttgagcacagattttatccctttcataattctacaccagcataagaagttaaggaagtctggactaactagtcttttgagaaaacaaacccaaatcttacttttaaaaatgaactctgtaatgataaactaaaggaaaagacataaaactatttttagaccaaagttattaaatcagtctagtttatccaaacattcaccttaattctgtgaacttggattcttttataaaaaatgtttctgagttagaagtttcttgagaaatactttttaaatccggcacttttaaagtatagatgttctcttttttattttctgttaattttgagaatattagatttatgtcattgcctatttatctctataaagcaatcagaacagagcatctttagtttctgggtgataataataattccagaagtaggaaaatacttcacactcacaagaggcaaatgcttttcaaattccagatacatggacacataaagagcttataacttccaacctgcagtttcagccacaagtcaaaactaaacaaagtcacaaaaatttaccagtcaagatctcaaaagagctggctttctttataatagatataaaatatgctcttaattgatttgaactctcaaatagtcagacaagaatacaaaaaaactaattaattggattcgctgatcaccaaatgatcagaccataaaaccaaaactacattctcaatcattactgccgccagtggaaaattacctattagctgtgcggaaaccagaaacaaacaaaaaaatcagtagaaggagtaaattttaaaacctagaaaaaaaaagtcactggagttcaaattctgtttgctgcctagggtccaccctggaagctaagaaaagatgtacctgggcttaagtagcccatgagatatatttcttaagctacacagtcaatttgagttcatcaggttagtccacatggaactctcaaggggaccaccaaaactgttagcaaaggaaatttttggaaaacactgaaactagagattttcaccctgggaggccttttcataccacctcaggtcccgtcaatgacaatcattgccttagtgagccaccaccatggagggagcaggacacctcttgcaggtactttggggatgaggaaaaaggtcaggagtccttcctgagaaaatgttatcaactgggttgtttggagaattaaatgagagtatatatatgatagtattttgaaatacataaagtggtattcactgtttttttacctaatcaagttagtctgaagccagatttacaagacttcttcaagtgtgactccataagaatacttgttatgaacagcctaagttaacctcatctatccctaatcagctaaacactttctcaaatcataactcagaatttattcttaagtagatttattattccagcgaaatggaattcaaacttgaatctatgcaagggtatgccagaatattctgcacatttatcctacacatgcccttgtctatagcagtgctgcacaacagaaatataatgtaaactaccatgtgacttaaaatttctagtagccacatttataagtaaaaaaagaaacaggtaaaattaattttaataaatatatttgttaatctactatttccaaaatgttatcatttaaacatgtaaccaatataaaaatgtaaaataaggcattttacattttacatttttggagggagggtactgagtctttgaaattcagagtgtattttatatttacagtgcatctcaatttgaactagccacacttcaagtgctcaatagtgacatgtggctagtggctactgttttggacagatctataaaactgcttttttggagactcagcccaaatatcttatgtcacgtggttataaataaaagtatcagtctaatggtttactaagtatttatccttatggtccagggaattgtaatgtcctcactcccattccaaggagtttatgaaatagaaaatgcattaaaatttgggtcactaagaatttgttcacaaaaataaaatacacattaaaataagtgtctgtcctttaccttagaccttttagacctagtcattaaacttgttatttgtttcaatgtacttagtataacaacaataataattgcttaaaaatgctaattaactacatacttcattactttaaattaaaaatattattttaaacaaactaccagtgaaatcacttgtctacaatatgagaccctgaaaagactgttttcctgacagctgccattgggcaaatcatgaataaacttatagcagtgtttggagtttcttcagatattaatattaaaagacacattttacttggaatgtttttactttacaacttaccctagacatataacatgtatacagaagtaattaaatctttttccctggcttgctgaccactcagtaactcgttcaccttccaaattcagtatattcaaccctcctattcaaaactcattcgtcaaacatttcataatttccaaggaagtgatgtttagaatttgacactttctgtgtaaattatggcttgttttgaaagcttaccctaaagcctctttaaaccataatgtgtctttaaaagtatatatgtatagtagaaacatttttgcaagtgttgtaactaaaaccaaaagatagtgctactgaataaaatattgttgtttatcttgaatactgaggcattaaggacaatgcatatttactcagaggaagatgagaaatacttaaccaagagcctagtgcatggtaggtacataggttaattagtgaaaacttttggaagattctaaaagatacttcttggctcttggaagagaaataggagaaaataaacttctggaattagacaaaggccattagaaataatggttcctccatttgttagaatgtgaccttgaattttctcagatataaaaggggaataattacacctactctgaagggcgatagtagggattcagttaacttagataatacagagcctggcacagaaaaatgctttgtagctgttatttcccttccctttgtattttattatgcttccaatcacttcaaatatacatcttttctttgctatagttatgtcccaggcactacctattacccataaacgagatttgttttggcttttaaatggaatgaagagaaggaaaagaagaacagaacagaactacaagaagcgaaggatgtaaaagattattatgagatgactaagcgaaaatcgtgtaagacagaagaatgaagaagttgagtaaagagaagaggcaacagggaaacggcattagatgcccacgatggaattagttgatctgtaatcatccaaaagcaagaaaggctgttagtgtcttcagaggggactaaggggtatgatagaatacagaaggacaggtactttccagtgcaggcaaggtgagttttccatcactgaaaaagggttggaagatatgaaatgatgttggagtggatgtaattaggagaagaaagtctgccattggccatttatattgcaggacctaacctgaactttgtaaagactaacgagttccagaattgtaattcctgaaattaccgtttaatatgtattcatttatacatcttatctcccatgcctaaaacttttctaatataatggtgaaatgtccaatctgttgatgtacacatggaaaatggcccaattgacaggtagtaggcaaataaatataaaagttttttaaggttaatatagcacctaatcctctatgttagtcagacatgagtcaaatgaaaaagaaaggctctgcattgtggcttgaaggtaaaagggaaacacatggaaaaagcaatctccacagtaatcagagcttgaaagatcaatacttacttataaacaaataggttatcaatttctattagtactctaccactgtagcaactggaggccttcaggtataatgagaatatatgtcagtaatgtaatatgtgaccttaagacagttgttaatcagatctttttaaaagctatttaaaacactgaaatgtggaattcaatattctctgcttttaggtgccaccagattcattcataactttgttaccggaaataaatataattctttaatttcagatttcttttcactaagcccatctgtgctattcttggcatgtctttgttaagagttgaaaactagacaggattttgtaatttaggttgaggtggagatcagcttttagcggctgatgataagaagtacggctttgcatgtataaatgggttttcactcacatctgtttaataggttaaaaaacctagagacaagcctgatccctctaaattaatctctgcccactacctacagtgaaaattaaatgccttacatcagcatcctgcaataataaagtgggttctgaagataaaactttttggtcaaacctactagtagttaagaactgaaaagaaaacccgtatcttactctcacccaccatactcccatctcccaacaataccttgtatgtttaggtgtatttaacacacatttgttaaacattgttagccatgtgctgtgcttggggctggggatagagagataaataaggccttaggaactggcagtctggtgggaagtccaacagtgaatacttggtacagtgcgtaaagctggtagtcattttcataactctgtgccaggtaagatacatcaagctttctctatgttatttcatttaatcttatttaatcccataattcccccaaggtattgtcattcccagtttacatagatgaaggaatggagacagttgcttgacacagttacttaaggttaagtaagcttgcccaagatagagaaatagttccaccaagattcaaacttaaatctgtcatattgcattcagtttaccattgctgcatctacaatttttatatccccattttatttaatataatttagtgacagatatgttattttcactaccttatttttaatagtgaattaaacatctaaaaagcaaataaattagtgaaagacatgtcatataatttttttctaacttaatttcactaacatttatttatttctcatatcacttaaaatcctaaacagcaatatggacttcttggatgcatatctgattttcaggtgaatcaatactgtcccccttacttgtatattgttttttcattgttgatcttatctctttcatcacccttttctctcatccaacactgaacatgaaatagtggcaacatattacaagtttacaaaattgatgacatctggccatactaaatttcagggagatattgaggaagatcagtatttgttgcttttactccaacagccagcccttaaggttagtggcaagaaagggagtttaagggggcaaagtatgtcccctttgtacatacatacaaaggaattgtaaagcatacaaaggaatgaacagagattacatattaaagaaagaggactaaaatattttggaaaatgtcatgtaggtttcttagcattattgaacctgggaatgacatgtcattcatcctagacttgagagagaagaattgaagcagggaaagggaaatatgtatctatctttgctataattgtagttaagaaatccttagcagaaatgaatgttatttaatccttttaaacttggaagcaaatttaatgacatcaaaaacataagaacaacctaagaactcccagtgtgagaactcccaacttaagaattacaggtaaagcattaaaattaaatgcattaggacattgcaataaagttattcctaggttttctgctataggaacatgtactggatggcagacactatgttatccaaagacaatagtcacagaatgcaaaaaggtctagttcatctactgtcatttgtacttactttattcttcgttcaacagattatatattgagcaacttctatgtaccaggagttgttctaagtgttggagataaaacaatgaataaggtagatacggaacctactcatagtggggaatatagacagattaacaatcaattaaaaccagtgtgataaatgtttcagtgctgtttgaggaaacacagattgctatttgagcatactggagagccgtggtagcgcaaggaaagtttttcaggagaaaatgacatcatggctgagtcttaaaggataaaaagaacttagtcaggtcagaatagtgaaataaatgggtaagtttatacccggcctagggaacatcacagacaaaggacaagaggtgagagtagtgtggcaagattttagagtgtgaagaggggaatggtgagagataagagttaagcaggttccagatcattcagcctcttgtaaaacaaattaggtagtttagactctctcctaatcactcccaagagctattgaaggtttttaagcagggatttgcattttaaaaacattatcagaccataaggtagtactaatactttcgtagtctttcacaggtaatcatggacattctctacctaattccacactgcagtgatcagtatcagagtgatttttgtgatcagtatcagagtgatttttgtgatcagtatcagagtgatttttcttattgcaatgttagtgtatatatagccttaattattcgaaagaaaaatccaacttatgaattgtcattaatgcaaaattatttatcagaaaatcgtagagcactggaaccccatcatttcacagatgagaagaccagaagcaaaatgacctgccagagttgcagactgacaactgctgccttggcctagtcaagcccagacaggcatctcctactgccttaatttgggggcatctttctaggaccctgatctgcctccacatcttgaaggattttcaagatagccatgtttcacaaaggaacgagggcagctgtgtttagagtggtcaaatttctgattctgtttttttgcttaggaacctttcacaaccttcttcctcaatgcaaatgatggaaaatttgatcatccagatcgaaccttctcatccgttgcaaggtcttggagaactagtcagagagatacttctgatgtaaaggtaggctcttttatttgttgatattcattaaatttcaaaatatgtggaaattttgatttttttaagtgggtatgtataagacattttatattgcagctttgttccatcatattaaaattatatggtacatctaaccttataggaaataattttgaacattatagaaaataactgaaaattctttcatattacccagtgaaggtgttttcgttatttcaaaaaattcctacctaatttagatcaaataatcaggagatgtgaaaagcctataaaatgcctttcctgctgttaactcaatatttggtccattccataaaacacagcaggaattggatttgaccttaatgtgtcatattgttatagcttgcctggcttggggtttgcgtagcctggggcaattaataaagcattaatgacaagacccatttaaaatgtaggcttttccgtatagccttagcttttacttgactgtgcctggggatactatgcaacaatacacattagattaaaccaacacacacacaatatccagaaacagccagagagcagagtaattttacagttggtactgcttaactattgttaaatacaaggatttgttattcatttatatgggctcctattttaaaaaagaaaaacattgtattcaaagcaataatatatatttgttctctcatttgtctcattttttttcctgataataaggttacatggccaggttattgcataggtaaatgtgtttcttattttaagctcattttcttcaaggcacatttttttcccattactgtcactcagtacaaaaatgttacggtatcattccatttagagccttaaaccaacaaaagttagtgagttaaaatcaaaattgtcattcacatatttatgcttctctattgcaaaacatttgtaaaaggcaatttcagtgttactgaactgtaattggatgaatacaagttttgttcagtatttttccaaagcagaaaataaaggaaatggagccaagtagattgtaacatatctgtgtgttttacttgttgttgtcaaactttacataaatgaatatttattcatacaacatatttacatttgtaaaaaaaataagagaatttaatatgcatccttactatattaagctttgaagttctaacggtcttacaactttgctgagacttaaactctaaaatatccataagccatcatttaaaatgatttgttaccagtgaagtcaaggagggagtctgtttcttatataataacactttgagaattaatacagaaaatgggagtccataggctcccattgaacagtagtatccagaattcacacaatgttcataaaaggcactcaaatattttgtatgtgaattaaatattcttatctgtaattgaaggcttcttatcgcagttaagattattgatattttaaatcagagctatatccatattatatcagcctatttcaaatgaaaatgcctgctcactgttgtttgacatcatcacacacacacacacacacacacacacacacacacacacacacaaattggcttttcaacttaattcagagatccaccctcacatatttgggggtcagtcattctaatttttatatacagttttagatttcacttcctagcctgagaatttcactgatgctttataccaccagtctctgataaccgatgccctgtaccgggctttttcctctaaattctcccagaaattttcctcttcaaaaccctttcagaaacatttacattttattactaattgtatttggggggctcctgggttcacatcatccaggacaaagaccaatgtggatatcactaacttgggagtttttttgttttttatcctcaagcagctgtactgaacacaaacatgcagctttttttttccccaaagacttaattagttcataagaagctcatttccccaggatgacattacacagattgctctcattttcagctctcttaccaccactcatgaacctttcatattatatgttaatacatcttagatatcttgccatgtagacttcccctttctttttaaaggcagcatgctacatatatacaataatttatatatgtgatctctggttgatggagaatctttctccctgattgttactatgaagcacaaggctgtagtgaacatctttgcacagacatcctgatggactccttctatatacataaaggctaattcttattaatgggactgatggctcaaagacaatatactttttttattttttaagatattgccaaaccatcatcctcaaagatgaaaattcactctctacagcagtgtgcaagggtacctccttccccgtgccccctacacccatcatcactattgtattaaacaatggaacttctgctagtctggcaagtgaaaaattaagttatgtttgttttagtttgcatttttttttgagtgacgtggaacatttttcatgtacttattgacctgtacactgactcctatctattgctcatttttcagttgggtcacatgtctttttcttactgatttgaaaaagatctttgaagttgcagaaggttccattgcaagtagggtttcttggtcgtcttagctttgttatggttcgtttaatgtgtgtgtgcgtgtgcgtgtgtgtgcatgtgtgtgtgtatgtgtgtgtgtgtccagtcaaatatatttatattcccctctatagcatcagaatttgaggtcctcatgaccagagtgttaaagagaagataagacttttgggtaataactagtgctaacttgagaatcttctgaattcatgattaaacctgatttatcagagaaaaatatgttgctacgagtagtaattgttttgctacttgtgtgttagaacctaaagtttttattcttatttctaagctgttaaagcacagcatgatatattttttaaggaagtgtgtttccatttccagagaagaaaagtatctctgcaatgtctactaacttagtcagttaatcacataggagagaactaggatgcagtagatggttttattctgtctgtctctattaatgtcagtctcttcctgtgctaatgaacgcaagctgggaagaaggagtgctgctgaagtgacctttcaggagagaggtctctggagttgagtcagactagttagtttttactttattattattttttaaatttctttccctctagcctagtcttggtaacaatgacattcaactcactgaagttcttacactaattttccttaatgccttcaaaagttgttatattacttttagaatagctatgtagatgtcagaaaaggtagctgtgacaaaatgtcattaaggtgacatagtgtaaattaatacagttaatggaggtgctcgccactgactcattgacccattatgagctcttgtggaattaatgaatgccagggcatcagtcttttgaaaaaaaaaaagaaagaaaagagatggcagctttaaaaccttgcaatgaattatattagaaaagtgaaaacgtctggatcggatttgatttcactaggaagccataaaatggtacgctctctcagcaaaatatattaaactgaaatgtcagatttgatgcaataggtatacaattatgatagtgttaatagtggtcttctatcattctaagacatactttcaggtccaatttctcagcagcttgaacttgtcataagcttataaattaggaatcgcatttgaggatatgttcttattttttgacagaatgtatataatactattaactataccgtggggttttagtgtagctgctaaaataaactagaaatcacatttatagacacaaaatgtctgctataatgttcattttgccatttctttaataatatttggtgttttcctgcactgtttttcatttaggaaattttaaactacttagactttttccttaaagagaagctgattaacagaaatttatcaatgggaagagagtcagcagaacagcagttatcttaagcatgcaatctagtgtctaatgtgcctctgtaggagtacacttacacattataaaaataagcccatcttttaaaataatactgaatagttttcaaacatgtttttgttggttgatacagtccttgaaacaatcctatgaggtagtagtcattaaccctattttgtaaaggaggttcatgaatattaagtgactcacctaagttcacacgcaggcaggtaaagaggaagccagtactagcacagagtctgtccagttatttaagatgcttcatatccaagaggattttaagaatgggagctgcaaggccacttcatgcctaggcccggaagtcacatcatgttacttccacagcgttgtattgctcaaagcaagtcatggggccctcccagaataaggaagagtagacacggactccacttcctgatgagatgagttgcaaagtcacatttcaagaggtcactgagggtggagggattactgtgcccaccttcggagacagtctaccacagtcctccgaatctggtcaaaattcacattcctcttacatgtaaaatatactcaacttgttccccacaagtcccatcccagtatttgtatcagactgaaaatctggtatcttgttgtctacataagccccaggtacagataaggcacagcaattcctaatttggagacctgggagctaaaaagacaaattatctgtcccatgtacacacaacatgtggtggtaagacagaacagttaaacttcggtagaaactccattcagaagggggagaatgtggaaggtacatagcagtcaatgttcatagcagttctgaaacgcagccaggaataagttgtcgattacccagactgcagggacagggactgtccatggattagggcccaggtctgttatctgggcttggctccttaattcattattttccatggctcttggttacttcctctgggacattggctttgccctctgaatcgttcttttgtttccagaagaaataaacatggtttgcagctgagtatctttctctgcatgcttcctgaccatagaaagttagggccaaagcctcatattcccaagttggtacagcagctttaaaactgtgtagcctttctgtgtatcaaattagaaaaagctaatactcacaaatccttttggaacaggattctctctttcaagctgtgaattaggatactgtttataatgccctaagaatccctttctcgtgaatcactctgtgtagctgagcaagtctgaaaaacactacctgaaattttaacttttataaaagggttttacagacacacccttgattttagctttattctatggccatattttacttgtagcaccttcgaattgatctccatcctgaacctatgtcttattttgagaatcttttgccaactgaagagagtgttctaggcccttctattgcttgaaatactgcttcaaaactgaacagtttcttcctgagttcatctctctcttgcatagcttatctcttttgcatagcttacaccattagatgaaaccattggtcactttcagcattctgcctggaaatcttctaagtcagaagcacatgcttattaggtacttgttctgtctttgaaattattgcagaagacgatgttaattttccaccactacttaagagggactgcttccaataacaacttccttgctgatcttccagaccccaccaggctcctcaccacccctcccacttctgcctgctgcctcatcgcaagccagaatcatgtgttaaattctttttattactttagcactccactttgaggattcagtttctgttttggtcatttatgactttgtaacaaatcaccccaaaacctataggcttaaaacaactatttattcatcgacaattatgcaatcagagttaaggctcaaaaaggacagctaacctctaagccacacagtgacagtggggcagcttgactgggcggcagaatctacagtggctttgctcacatgtcttgtgcctcatctgagatggctggaacagccaggaactgcctgggcatgtctgtctctatcacatgtttctatagcaagggagccactctattgcatgtggtaactggcttctaagaggactaaaacaaaagctgccaggcctcttaaactcttaggctgccctaagaagccttgcagtgtcaccttgtcacgttctgtgtgttgaaacaagccaggccatattcagacaagggggaaatagactccacctctttatgggaggagtaaactggagatgccaaagggcttgctcttgggatgggaggactgttatagccatctatgagaaaactctgtgagttaccaatttaaaaaatactttaagtactagtttggtttgtaccattctctacagtctgagtgtgcatttagacataaaccaaaatctcatgagcaagcaatttataaaatacatctgattagtttaggtaatatatgttagtccatatatatgtcaactttaaataaccatattcagaaaatatgattaagtgtaaagtttgtttgagctcaaagcttgagaatggtcaccccataacataggttcaagtagccctgaatatacactctgattagcagcaatcataaatgggtttttaagaaaaaaagaagaggcaggtcctaagttgcttaccaagaatttacattaaaataagataagccattggctatacattgttctttgtatcaccgatttcaggaactgaagataatgggtaaggcagctggtcagaaaccaaatgcctttttaaacagttgctccccaggcttgggttgaggaggcagcatgagtgactgatgtcccacacgcacgtctctctggacctgatgaatttttgcatgcctcacataactcagactgctgtgagctattcttttcctcatatttgctaaaaatacttgcatcatctgaactgtctacatagctattcattgaaacacaatccacagtgacagaacttttttactgaattacaggatgcactttggtactgggtaaactctagtctcagaagtaatatttttgatccgtgcccctaaaaaaaattgagaccaaatagcttctagaatatattttatataaagttatgaaatgtattgttttataaacattatttcatttaatcctcacatctaccctaagagttcattgctgacatcaccaccatgttacatatcaataaactttttgtcaaaaggttaagaaacctgcccaagctagcaagaagtctggattggactcagacctgtttgattctgatgtatgtaaggtagcatttccctggtagaagaagggacaatcccaatgctgctgcctgcccagcttccccctttatcttcaactcactggtagccatgaggttcctcttctttaagaaacacactttgagccgcgtacggtggttcatgcctgtaatcacagcacttggaaaggcagaggtggacagatcacttgagatcaagagttcgacactagcctggccaacatggcaaaaccccagctgtactaaaaatacaaaaattagtcagccatcatggcgcacacctgtaatcccagctactcgggatgctgaggctcaagaatcgcttgaacctgggaggcagaggttgtagtgagccgagatggcaccattgcactccagcctgggtgacagagcaaaactgcatctcaacaaaaaaaaaaaaaaagaaacacactttgaaaaccagggcctgcaaagtttttaatcaacatttcaatgcctgaaatttaggatatggtaaacatagtaatcttgattcatttttaatttcacaaatatttatggattacatattatatgttagcaccattcttagcaagatagacaaggtccctaccttttgggatttctattatgatgggacatgcaagcatacaacaataaatagagaaaataatcattgctatgcagaaaattaaaacagagtaacgtcatatagaatgactagatggtggccggatgttgtggctcatgcctgtaatcccagccctttgggaggctgaggtaggcagatcacgaggtcaagagttcaagaccagcctggccaatatggtgaaaccccatctctactaaaaatacaaaaattagccaggtgtggtggcacacgcctgtagtcccagctacttgggaggctgaggcagaagaatcgcttgaacctgggaggtgtaggttgcaatgagctgagatcatgccattggactccagcctgggtggcagagcaggactccatcgcaaaaaaaaaaaaaaaaaaaaaaaagaaaaaaaaaaagaatgactggattgttactttaaaaggcagaatacagaatataggagcaggaaacctggatttaaagtatctgggtttgatttttggccttactaccaatttgcagtgcagccattagcaaattacccacccaatctttacctcagtgttcatgtctataaagcgggaataatgagaacacctacttcacaaactttttgtgaagattaagaaaatatatgtaaagcacttagaacagtgccaagacatagaaaggtaccaaaataaatgttacctgctggtttaaaacagaatgaccacaggtaacatttaagttgattcctggccttggagcacaaatgtagtaattgccatcttcttgcacataaccagttaaatctcagagatgaaacgctcatattctttggtttatatttttgaaacaacaaatcttttcaataatggaattgtgaatataaattatactaatgtcttgtgtttacatacactaactttaaataaaacttgctatttgaaacaagattgtaaaacaataaaactgagaccaaaaaaaaatctcacctctgctgcttcagctacttctccctagacttcttgtgatttcacttcctctactatccccttcacaaaactccaaactatccccaactctggacttcgggttcagagagctttagtcactgatagctctggtgtttgaaacctctaggggctctgcaaacaagctgtgcttcagaagtttctttctatctgtgtttaaaacatgtctgtttagtgattgtttccattatgagaaatctgggagagtttctttgtcccttcaaacatcaagcctctaacagcttacatctacatcttagttaatgccctaatttatgaccacatttgggtggcctgataagaatggagccaaaaaaaccatccttacttagaagggtgtcctgaaggccctggtaacacgacttctttctatgactagccccagttagggcctccttgaatgatcctactggagtattcttcctcctgcccttctaaagaaccatcaagacagatctttctaggccttccttgttctttggtggaggccagctgttagtgcccttctttctagagtgcctaaatgaaaatgaaattagtcttctgccacttttgcagtttgagaacaattctgatggcaactttaaaatcaactttttctatatttaaattgagctattttatacttttgagccttttaaatgtaacttgaataagcaagataacattttttaaacagaaaagtttccccttaaaaggcagatttcatttcagggtttatatccttttccttttctttaataaagttcttcattcactctttccccatcttgaggcatttttctgaccatctgtgtattccccagatttctagtcttattaaaataacttcatccaatatctttaatagcttaatatttaatgagcacctgctgcgtgcaaagtatagcactgagagctacgaaggatccaacaaaacataaacctcacaaaataggctcaaaactttgcgtttgcccagattttattcatactaaaattgcattttccccaattttattcacattaataaatatgacatcctatgtttcttgcgcctttgtgaatctaatttaatgactttcagtgaaattgcattgtagtggtaagtaggttaataatgaccacatattttatacaggaaagaatgggaaataatatatgaaaaacattatagagtgccaagatggtataagataaattaagactattttagttgtttaaataaaactaaatatattttgctatgtacatgtagatatatacgttcctctctgccctcaaggaagcttctgtagcctcgttgtagagatagggcatgagcacaaataactgacgaaaggcagtaagggaaacacctgatttatgtgagtctagtacatataaatcacactcccaaccgagcagctgcacaagcttacgttccttcccactttggaccctttagggtgttattgctattgtgtcacatgaagaccaggtcatatgcaaatagcaatagtctttgccttctctgcgccttttactaattcctcatgttttcccaaagagtgagagtaagagcagaagaaactatatattttacattcatacattgaagtcataagataataatatgcatttctgattggatgccaatacatgagaacagcagtgattctttacttctactctcctgtcagcgatcaaaccaaactgctccttccgtgactgataaacactgtcatgtttgcccagcctggaaatcaaactcatgatagtcattgctgatagaatagtcactgctgaagtgccctttagcctgtcttatccttcaattaaactgtatgatttttggcaaatgaacatgtgttttctacagtatggtttttctttcagcctcttctccatttccccgttcatattggagtcattgaaaaattatattaatttgtattaattccactagaattctcttttcctttttcgttgtggccttgaggtcttgtacatagtttattgttgatacacatttggcccctagtgtgagccatctaattccctctctttagctctgttgtagatttcccctctttgataaagttccacaatagggcccctttctctccacacttagcagttgcccttctctctttctcctccctatacatgcatatacaccacatcttcccattctccaatctctcctttactttgtcacccagtgtcttgctataaaacaaatttgactgtgttaaaaactcttttttaaaatttctaaaccactaagacaaaatccaaacagcgtatccttcattaaacttttctcatccatctggcctcatatacctcccaccatctcatccctcccttgtcttgatctacccacaatataccctgttctcctcttgtgctcagtttctcaccattccatataactccctgagggtgcccggccccctcttctggttttcatcttagccatgctccaactccaatggcccatctccaatgaagtctctcctgacttgcccagaatcccctgctctttcctccctgctcccttcttcctcagctgctattgtgtattataaccatctggttctacatctgccccacaggccagactatgaattacttgacagtaaggccatgtcttgttcattttttgtttcctgagtacacatcacagtttctggtactaaaaacctttactgtatgcataagtaaatgtcagagaaatatgtaaaggattttagaaagatttctatttaaatagaagaaaactgagattcttaaaaagcaaagctccatttatccagaaaaatcatttatatggacctgttgatgcacccataatgctggagaaaatgaacatttatatttttcttatggctcacagtgatcatcataagagtaatggtcagtttcacacagagtgttactaaaatgaatgcccacttaaaacagatatatcagttttagtgggagaactcgtgaagagaaagattttatatatgctttttctagaaagttagggatccagtttatttgaagacctcagtatgtggtggttttaattttttctatgcatccctagaaaagactacagtgagatttaaatttcagatgctatgccatcaatgttgatcatattacacaaataaatgtgtagcctcacaaccctatcttgatatttgaaaaaagatgatcaggatggtacacataaaaactacagcagtttgttttaattttctcccaattactttttaaaaaacaacaaaaactttcagggtattaaaatcagttcatttctacatcagatttattctaaagtaacagaaacctcaaattagatgctgtacatcacacacaagttctccttgaatccagttgtttatgctacagttacatacaagtaacacaagttgtctttgcatccaatttattgagaacctgtcatttctatggcatgcattaaatatttaaaactgtttatcatattgtgtatcatctcttttattgtgttcagtgattgatataaaaataatttactttatcaagtaaaaaaaactatgaatctctttataaaaatcacatattgtaattgtcagtatagttaaaaacaaaagtagaaaatatgtgatctattacaaatactggcaattagtttttaatttggatagttcataaattttcagatgaagattttacacaacatagacttgtttatatagctttacatatttgttttctaatgctattgtgaactgttgttaatttgtatactcatttctcttcattaatttatgggaggataagattgaaaataggtaacattttaaagtagctatcataaacataaattttcaagtgaatttttcacaagaaatgcttcatctcagatctttaaataaaattaaatgaagaatagaatagaattaattcataaaatattggttttaagaaattattttattccatttatagttaataagttataagttaatagttttattcaactgatttttataaagtggtttaatatgcttcatttttattcctgataggaactaattccagagttctactacctaccagagatgtttgtcaacagtaatggatataatcttggagtcagagaagatgaagtagtggtaaatgatgttgatcttcccccttgggcaaaaaaacctgaagactttgtgcggatcaacaggatggtaagagagattttgcttttgcttgggcagtcatcagggagttaacatattctgtagttttgttttgtcctgttctttactataatattaccaattatacttaacatctataaatacaagcttaaaattttaaatgaaaaagaaaacattttactgttgtcttgacagcattccttattgtagagtggattttccgttcatgaggactaataaagcaatggtaattcagttatgtttgctcctttaggagaagacaatcagatgagcatctgttgactaatataatgtattctaaagtgcttaaaataaatgcctatttcttagttttatctactgactaaatctgaacgcttttttcacttataaaaacactcagaacagaaaaaaatttatttagaacatatttatatgtgcgatatttatgctgtgaaacataccttatggtgtaaacattctgaaatagaaaacatctttttttgttttgttttacagacagtgtttcactctgttgcccaggctggagtgaagtggtgcaatcatagcacactaaagcctcaaactcctgggctcaagtagtcctcccacctcagcctcttgagtagctggggttataggcaaatgccaccatgccaagttaatttttaaaaaagattttttttggtaagataggatctcactatgttgcacgcactgatcttgaactccggggatcaagaaatcctcctacctaggcctcccagaagaaaacatcattattttaagctatattacagatatctgggtgtttaaatgagaaatgtataaacagaatgttcacatatgggaatttgatgggttttaatacatttcacacatatttaaggagattttaatcccaacatggttatagtaggtgacaataaaccactttacaaaacagcctctctagtgtactcttgaattacatcaataaaaccaatgacgccaaatatatttttaaccctgtttcattcactcccaagtttttccaactgtctgataaatatattttattttgtttttacagcttatttatttgaatcagaattcaaataaggtccacacattgtgagggaattcacatattccttaatcctcttttcttaaagagcttaattgaaatataattcatatcctgtgcaaattgttcatcatttaaagtaaaaaaaaaatgaatattagtccattcacaaagttgtgcaaccatcaccacaatcaatttaagagcatttttatcacctcatagagaaccccataccttttagcatcttccccgatttttcctgatttccccattctccccagctagcccaaggcaaacacaaatctactttatatctccattgatttgactattctagacatttcatgtaaacagaatcataaaatatggggttctcctcccctcctctcgattttctgtcacttttcttttggactttactgtcagtcacacattttcttctattttggagctgtatgttctgtctctaagaaatattttacttttaacgtactttattttagaaagttgctgatgtaatatacctatgcttaaaagcatcatctagataatctgcaatgtgttctcccccctttttttttaagaaaatttcatgttttgcataagtcttattgccaatctctctcacttctcaatctgttaaattggcactttcagatatatgcagttatttcatactattcccttgaacaatagcttatttcttcaatttatatttttaatgtgaatgacttatatttcagtaatatatacttctgaaaatttctgattctttttagaattggtatttcatcaccacattattctcacatacttgaatgttatctgtaaatatcagtgtaaggataccagcgctacaaatggaaccctaaaggctcattgtatatcaatatctctcagtcacatcattccattgtagctccagagctcagagccctgcttggcacatactagttgttcaggaaatatttctgagtgaatgaatgaattaatgaattatagaggtgtagtaatctcatagctgttagcatatagtctattaagtccaaaccagtcaaactgaatgaatccttcactccggcaagcaaagtagccaatagttgttggaccaatgcttttgttgatcatgctattgaacagaattctcatatgggtgctgataataagtgcctcttacctgtcaggcattaagcaaggcacttgattttttttaacatttattttacagataagaaatatgaaggccagacatgtttcataatttatccatggcagagcccagattcaagtacagaaaagttttaactcctaagttatactctttccagtatgccagctacctctgatattatctcttctttgtgaaattctttgagattattcgatctctacttttaggtttataattgtcaatccagaccttatttatttcctttaacttcgtggacatggttaatgcagatcattcacagataaagactgcaagtatactaagcttaaatatgcattaaagaaaaatagagtggttatctttattatccactggacatttcacatttattaatttgctaatgtttactgataatgtaccaggaaatgtatatgacattttttagacttctaaacatgcagtaatgcagactggatgagcaggaggccactgttgtttcccagtcccaggactaggccacatttcctgctagaagagtactattttcagtggtacccattccattcagtgtacagataactttaggaaagggatttgccttcttaataaaagactgaaagtttgagaagaaagttttaggatgagcgaagatttactatgatacagggaaaggacgtatgttttttaaaaattggggaagtgggctctcatgtaaatgatctaaaccatcttgtcttaagtttctagtagaggcctaaattaacaaaattgtgttgtgaaaagcatagggcatttggcgttagcatttttgaaagcagttatgtaagatcagtttctcattatagttatttaagcagagacttttttgtattgaaaagaagccattggagagagagtatgatgtctcctttcagtttttgcagcagctcccttatcttgcgttaccaatagcaaatttcagtgagaacaggagtaactaagtatttaaactagtacttaattataatacaggtaaatacttctccagatagagaaagcctgcgcagaatgctgtttggaaataggaacacagctagtcagtggtcttggtgagaagctgcctgctctgtaaatgagccgaagtcataacaaagataggtggaagtaaaggtcctcagtgatatctcttcttaggagtacgtctgcactgatgcttccaaatgcagacataggaaacagtggactaagtgattggtcaaatgcctccagattcgtccactgaaaaataatttgtttgctatagaaattggtccccacagtttttcctcctttttgtcttcctctctgctcatagctcacactgtcttcttagctgttctgctgtgtttattgctttacctgattaatagacatggcaaaacaggctttaaagataaattggtgaaaccttgtccctacaaaaaatacaaaacttagtcaggtgtggtgacacagtgtctgtgattccagctactcaggaggctgaggtgggaggatcgtttgagcctaggaggtcgaagctgcaatgagccgagattgcgctactgcactccagccgagatcgcgccactgcactccaccagagcaagaccctctctcaaaaaaataaaataaaataaagataaattggcattcaacaaatggtgctggaaaaattggtgctagaagagttggatatctatatccaaaaaaaaggaaggggaaggtttcagtccttacatcacaccatataaaaaaattaactcaaaatagatcatggacctaagtttgaaacctgaaactatcaaacatctaaaagaaacatataggaggaaatctttgtgactttatgttagcaaagatgttttagatatgacaacaaaagcacaacctataaaagaaaacattgatacactggactttattaaaacttagcttgtttgaacactactgtaagaaaattaaaagacaagccacaggctgagaaaaaatatttcaaaacacatctaataaaggactaggatctaaaatatataaagagcactcaaaaatcaataaaaataaaacaatatttagataattaatttttttaaaggaggggcaaaagaatcttcagcgaagaagatatgtagatggcaaataaacacatgaaaagatgcctcatatcaaaaattaatccacaaattaaaattaatcaaattgaaaccacagtaagctaccattacacattagaatgactttaaaaattaaaagggggaaaaaaaaaaaaacctctgacatcccaagccctggtagagatgcacaatagctgaaattcacatatcctgctggtacaaaacagtttggttgtttcttataaacacacaccaaccatataacccagcaaccctgcttcttggttttagccccccaaaaatgaaaacttatacaagtacatcaatgtttataatggctttatttgctttcatcaaaagctggaaactacccaaatatttctcacctggtaaagggataaacaaactaaaataaactatagtaactccatattatgaagtactagttagccataaaaaagaaccaagcactgatacatgtaacaaaatcactttcttgctgtcacttggatgatgccaaaacatttttaacggctttattaaaatataagttatatatcataaaattcacttgttttcagtgtacaatttaatgatttttagtaaattttaacagttatatgaccatcaccacagtctaatcttagaatattttcaccaccccagaaagattccctgcccacctccagcccaaggcaactgctaatcaactttttatctccaaaggtttgccttttctgtgtatttcatataaaaggaattatacaatatgtggtctttgagtttgacttctttgagtagtttttgagattcacccatgttgtagcatgtattggtactttgcccaactttttacataatactaccacattgtgtggaatatcacattttgttcacccattcatcagttgatgaacatttgatttgtttctactttttggcaattttgagtaatgctgctatgaacagtcatatacaaatttctatgtgaacatacatttttatttatttggggtatagacctaggagtagaattgctgggtcatatggtaaatttatgtttaacttcttaagaaactgcccagctgtttctcaaaatgaccttgcattccccagcaatgtatgacagttccagttcctccatagcctcactcccacttgttattacctgttttttttttttattacagccattctagtgaatgtgaggtaatatctcattacaatatttttttttcttttttttttgagacagagtctcgctctgtcgcccaggctggagtgcagtggcaccatctcggctcactacaagctctgcctcctgggttcacgccattctcctgccacagcctcctgagtagctgggactacaggcgctcgccaccacgcccggctaattttttgtatttttagtagagatggggtttcaccgtgttagccagagtggtctcgatctcctgacctcatgatctgcccacgttgacctcccaaagtgctgggattacaggcgtgagccacggcgcctggcctacaattttaatatatattccctagtgactaatgatattgagcatctcttcatgtatttattgaatgctaaaacatttttagatttattttaataaaacatttagtgattcattatagacacagaatttgtgttcttcatagtcaaagaagtttgtatgcccccagaattaataattttattactgatgtgcctaaatgaaatagaaaagccagtcttgcttttaaagacaaatcccctagacagtgttataccccaaattttttgaatgtaggaaaagctaataattattgttgatgagaaacctttaaataattaatgttggtataagctaaacaagcaagacctacctatatctgcagaaaatgctacattcaactagtgtgttgggtggtaatgcaatccaactaaataaactttccagataaatgaattttctagattttcctaagtgagaactttttagaagcattatggttatctgttaagttttattttatttttaattgacaattaataattgtttatatttatggggtatactgtgatcttttgatatatgtatacaagtcagaatagttagcatatccatcacctcaaatatttatcattgctttgtggtaagaacatttaaaatatattttaaaaatatatatatttacatatatatataaataattaactacagtcactttgctgtgcaatagaacaccagagtttattcctcctaactgtaactgcaccattgaccaacatttcccctttccctatccatatctcccatcagcctctggtaaccaccattctactcactacttctatgagtttgacttttttagattccatacataagtgagatcatacattatttgtatctctgtgcctggcctattttatttaacataatatcctccaggttcatccatgttgccacaaatgacagaatttcctgttatttcttaaagctgaatatcatttcattgtttatatataccatatttttaaaatccattcattcgttggtagacacttaggttgcttccatatcctggctattatgaataatgctgcagggaacatgagaatgcaaatatccctttagcatactgatttcagttactttgggtaaatacctagtgggatggctggattatatggtaattctatttttagttgtttttgtttgtttgtttgtttgtttgtttgttttgagacagtgtctcactcttgcccagactgaagtgcagtggtgcaatcagtgaccactgcagccttgaactcccgggctcaagtgatcctcccacctcagcctcccaagtagctgggagcacaggtgcatgccaccacacccagctaatttttaaatttgttatagagatggaagagtcttgaactcttgggctcaagtaatcctcccacctcagcctcccaaaatgctgggattacaggcatgagccaccaagccaggcctatttttagttttttgaggaatctccaaattgttttccaaaatggctttactaatttatgccactactaacagcgtagttgttccccttttctccacatctttgccaacacttatctttcatcttttttataatagccaatctaacaggtataaggttatatctcactgtggctttaacttgcatttttctgatgattagagatgttgaacattttctcatatgtccattggccatttgtatgtcttcttttgagaaatatttatttaaattctttgcccatttttaataggattatttgtttccttgttgagtagtttcggttccttgtattatggttatctttctaaaatttattactactttgttccctgcccttttatacaaggaatgatacttcattttttacttaaaaaagtcaagtttatcatcctgagtacccattgttattccatgaagtgatataattccatatctattattttctactttcttcttcaggttgtcagctatcagtacagttccctttaatagccctcagccataccaatgaaaattggttgtttacaatctcttctagactacaaaaccagataattcattgtatcaagcccttattataaggcttaagaatcagtcaagtgctcagtgaggccgtagaggaaatgtgaattttgtagctctgatagggagtgactttagcctctacctcaagtttcactggccactgctgatttggaagttgtgtatcaacagatgaagtgacaaaaccatccttagtaaattaatgtaactacaggcagcaccaggttaacacttcttcttacatgcaaacagctatctggctggcctaaggcattcttctcccctagtatagctgcttgcatttgtttctcctctttcctcattccaagacttaactgctgacaactgctgcaaatcagaatggataccctaatcttagccaccttaccccataccctagtgatagtcctgagtcatcctgatatgaaggttgaccaggatatcataatggcaatgatagtgcttgtaggacatgccatttgagtgtgtattctgtgccagatactgtgctagaacttcaggtgcatcattgttttaatccttaaaaaatcactttcagaggccaaggcagatcgatcgcttgagaccaggagttcaaggaccagcctgggcaacatgttgaaaccccatctctactaaaaatacaaaaaaaaaaaaaacaaaaaaaaattaacaaggcatggtggtacatagtcccagttactcgggaggctgagtgagagaatcacttgagcccaggtggacagtgaggcaacatcacaccattgcactccagcctaggtgacagaataagaccctgtctcaaaaaaaaaaaaaaaaaaaattagctgaggagttattgacctgaaacccattgaggtaaaaatatattttttttgagacagagtcttactctgttgccctggctggagtgcagtggcacgatctcagctcactgcaacctccgcctcctgggttcaagtgattctcctgcctcacccttccgagtagctgggattataggcatgcaccaccacgcccggctaattttttgtatttttaatagagacagggtctcaccatgttggccagcctggtcttgaactcctgacctcaggtgatccgcctgcctcagcctccaaaagtgctgggattacaggcctgagccaccatgctcggccccattgaggtaaatttacatgccaaataccaccaccttatcaaggtgtcagtgttcttattcacagtctccaggataggtaagtggtggtggcaggcaagaggagccgtggaggagaggagaaaggagaagagaaggaaatccgaagccagctccgtagggtgagcagaagatgggaagagatgagaattcagcatggtccagccccagcagcttttagggcctgactgtctatggtccctgtttctatatcttttaccctccacccttacccgtaaggcttcctttcactgccaggaaaccctgaacttacagctgaggaagtgccagctctctctgcccatctggtatgagaggaagtgtgtcctccttcaattctacaaatggaagaaatgatattcatttacattctaagctttgtagtcatgggattttagaactggaatacacctttatttgaatgaggagtctgaggcctaggaaggcaaagtggttcatggaaactctgaacccaagtgcttttctaactaaccatgcttggtgtcacaagttggaactctgaatgtagtgtccccttgttccgtcttaaagtctgtaaaattccacctgtattttgaattaaatttaatttatagattgacctgcgaacaaaaccatagtagaataatactgtttctactgcaatatatattccaatcaccaaattataaagaaactttggaatatcctgtttgttatttgcaaactgtctgtatctgtgcttagatggcctccaaacacctaattgtgacccagacttaaaattcagttttcctcagtgacactctggtctgtctcagtacacatgtgatcaatacacaggttttcttttaaaaagtctctttaaaaaacctgattctcaccagatggtttcatgacatttgggttttagagaattaacagattattcattgaaaggaatagcctgaaaaattgtataatactataaagacaatttaaactctgaagtaggttttccctcttactgtaagagagaataaaacacatgaatacaaattctgagtaacaatttttaaaatttataattgctcagagtacttatattgcacataaattaaatataacaaataatttactcctgatactaatatgaccagtttaagaactgacttctgtttatatatacttcttacctgttataacttgtctttttaacatctaaagtgctgataagcagactttattcaaagtgtgcttctttaaaataagcctcacggtgtagcatccctgtaaatacatattaatccagccagctgtgtgcaatgcactaggaactgtaaggattcatatgtaattcagtgaagccactgttcctcaaatatttactctcgcagattcagaagaattaagttttacaactaatatatgaaggatacatattgtgcatctctggaaatataaaacattctcagaaatgaatagtccattttaattgtaagtagtaagttccaacttgtgttcatgaaggaatgagagaagcaaggcactgcagtttccctatgttctaaaccaaattcctgttatttcatcataggaattaatggatctggtaagacttgtgaactgaaactttattccatggagcgaaaggctttatacaaaattctgcatattcaggataattaaactgccccagtctgtgttctctgcatcacctggaagcagtgccgggtgaaatggatcacgtgtaggagtgcctcacttgaaaagtgcttattgtttctgtgttgtgcttctgggttttccttgaaggaagcctacggaatagaaagggaaagctaccttgtgtgtcaacaaaaagctgtatccataacagctatagcagccattcttagttgcttcagaattagagctaaaggaaaagcccacactgctgcctctgagaactgtcttaagcatcaacgctacgcaaagacatctcgtgaaatgtggctgcatgattctgcagctgctcgtctctcagtgtctcctgtgctgcttcaacttgaagttttccttcatagcacctttttcatagtttctgttgctccaactcctggtcggttttctcatcctactactaggaaatgatcatactgatctcttgcagaaataatgtcagatatctgtgttaaaactaaaaagtttaaccagttatctacatatgttcatacttgctgaaggaatgtttatttggtgagtatttatgtaatatacaaagtctaggcactcatataaaatatcaagtatttaaattttccataaattccttgaatataggctgtattttttatgttgttttgtaactttaaaagtttctaactttatattggctgggtaattcatacaggatttagttcttatgaaatagctttagagaaaatgtgctctagtatatttataattttgactaggattatcttcagttatttgaaagagttctttgtaatgagcctaaagtataaaatgaaaatgtcatatattccaaagagatgacattcacagtggtaaaaaacctccatttctttgtatggattagtattctgtacctatgagtattccctccttctttcaaactgtcattaagaaattcaaggcaaagatgacaaaatattataaaaagtgatatcattgatgattaaatgcccagctttattactgcatgccagcaattgaacagcaggtatttgatgcatttgtagcagactttacatgtctacaacctaatttcattttttatttttttaaaaaatgaagcagtactttgttgtttaagttatggacaataacatgtatgtaattggttagaattgtttgttttgtaaatacagtgccaagagttatgtttcgctgtgaaatacaaagtttactctcactagaaaacctggaaaagcgatacagacacatttagtagacatttcaatgcattctaaggtcattaagtttatacgtcaagaattggtttaatttatccacatgaagctaggcttattagactgacttactcatgaaacattaataaagcattgtgtttagttctaacctgattataatctgaccttctgacaaaggacagaaatagaaagtatctgataacattaccctaatgctgggttcatccatcataatctacccttttaaaaatttgttttagaaaaaggccctttcacggatgtgcattgataatctcatctcgccctcagcccagcagattcctggtgctgctgggccaagtacaggctgtctgcagtcagcagagcatgcacagcaactgaggcaggggaagccaagctccagtgtggctctgctcatattgtattataacctttacagaatgtccgtatttcaaagaaaatgtttcctttttaagctgggttttttttttaagtagattataccccaaatgcaaatgtaaaaatttgcatttggggtataatctacttttaaaaaccccagcttaaaaaagaattttaagcaaataacataagaatttttggaagtcttatgtaggaattcaaaatatcaagatagacatcttgtgtttgagtgccatctctggaacacctgttagccatgtgttgtgctgaacccctattaacttcaacagggatggcaccaggttctagaggccaaagaagagacccagagccagtgagcatgacatagagttttactggggacttacctatcggggaaagtccagtggtagcaggctggacaggagacccatatggctcagtggcagcagactggacagcagaactgcaaccgcttgcaaaaaacctgctgtttatatcacatttttatttaacactcccccacccaaccacaacatcctgtatctggcaaccttcatttaacccaaaacaaagggccttgattcccattatggcctgagttccaagagatgggccagagggggctcagatattcttcacagataaggaatggatctccaggttggccaccccaattccctagcttgagactctcaactgcattcaggtgtgtctgccatacagggtctttctcaaggtttgttcaagtcatcactgtcaggtgcagcttaccgcacaccatgacacttggaagtaagacaccctatctcttggaactgcagtgtcctccttatttctcaaattgaggacttgttcattccataagtctttactgagagctagttatgagcaaagcattatggaaaatacaaagaatggccatggatcctactctaagtgaagttagagtagagaaattccttcgttcattccgtaattatgaaggggctatcatgcacttcatcctgctctgggctctgggaacacaaggatgagcaactcagtgagtggcttcagaaggtgcactctagttagggacacagacaaataaacaaacagtcccagtaaacactgatagtgtttattcaacagatacctgttgagtgttccgggtgatgttttatgtgtttgcaaggatccctgccgtcctggagctcacttttgatcaaagggagacaggcgatagacaattttttaaaagtgaaatatctagtatcttagaaggtgaccggtggtagaaaataccactgcaagaaaaggagactgtgagtacctgcaggggagagaggtcaggacagcctccctatgaagggagattagaggtaggcctggaggagcagagggagggagccaagtgactctcttggggaaagagcatggtgggcaaagggaacattagagcaaaggccttatggcagggatgtggttggcaaggaggccagtgggccaggaaagggtgggcaagtgggcacacagtaggacaagaggactgagtagtagtgggggagcatcacacagggtcttgaaggccatcataagtactttgcctttttaccctgagtaaaatgtaaagtccttgcaatcttttgagtggaagtgtgactgatcttccttatgttttgaagggatcactctggctgcagtgttgggaatgaatgattctgcaagggtagaatcagggagatctgctagaaggtaatttgagagatgatggtggcttggaccaggggtagcagtaaaagtagtaagaaattattgattctgggtgtattttaaaatttgagcctatagtctccctgggacttcctaccagtggccattttccctcaggtatctctagtcttacagaggcaggtgaagggctggggatgagcatgcggagtagtgatggctacagcagcagagatagataaatccatcttagcagaacattttagagagttcagctaaaatgaaagcgtgggtgtttagtgcctgttgtcaacttggccctttagcagaaattctaagcagcggaaaaagccagagtcaacatgtttatcctccgctagactgtaatctttttcaggacatcgaatgcttattcatctatgtgtcctctaaggctaatgtctgacatatggttggtggtcagtaatctggggcaggagagatattagactatattcaccttgtttatttgcatttcagtgggatctgctcccaaagatcagaggttttgtcttgtttgtcacagcatcccagggcctagaacactgcctggcacataacaggtgctccatgttgaatgaatgaatgctccctctgtttgaaatgcccttctcccagatgtctttatagttcatttcttcactggggtccttaattgtcacaaactcagagaagccttccctgacctcctcccctaaactagcaatcctcccccactacacatacaccctactccccatcctgcttttctgtttccttcgcacttgtcacctgctgacacaccctgtatcttactaattatgttagtttttgttggtctcctcccagtacaatgtaaactctcttgcagggactttgggtttttttgttcactgctataatcttacaatctagaagagggtctgtcacaaagcagatggccaatcaatatttgctgagtgaatgaatgagcttcttccccagccccgccctcattactgacatttcctttattccttcctcttgtgatcatcacatcttttccactgctttaattaataaacctataaatatttattaaacagttattatccaatgataggttaagagttgtgggaaatgcaagataagaattagataaagtccctatcttcaaaaggcttacattctaattgaggatatagtattaactttggaaacaatgaagtgctaattggcaatcatcccattcatttgtacagtacctcacagtttgttgtaaaatgatttcacaagtaaatttgcatgtgttatcttactctattaagtaacaagaggatactgatgaaaagtgttgggtagaaattcatagaaaaaaacaagtgagagctgagaacacaggaagcaaacactgaacttgagtaagaaggatgagtaggtcttcaaaaagcaggaagacaatgctttcaagctagagagaaagaaagcaaaagctctgaggtcataccagctgctgtgtgcccaagggctgtgaagtgtctgtgctggggaagctaaggatttatatcaggaagtcctgagaaacagtggggaaaggtgggatggaggtttgaaaggcctgagtcacataggttatgctgggaggagcagtggcagctttgaaaaagagaatggcaatgtggacatgatggcttgacaagtctgtcccacaagcaggacaccagacagactggattcagaagaagtttgaagtatgttgtagtaacccatgtggagagctgtgagggttagaaataatcttctgtcttatacatccagaaacagtcaagtactggaataatttaagccccttaaaataaacatcaaagacaactatattgtctctacttaaaacagttgaattattgaagttgtaatagctacaacttcagtcaaattatgaaaagaagatggcatagacactacagaagtgacaatatggctttctgattatctacttgaatatatgcaactctatttagagaattttttaatctcaaaagcagatttttgacgtaatgagaaaaagggatgggaaatatttttgctctgatctagaagaagacatgggtatttaatattcttaaattttaaaattcaggagaaatattgtctcctcacagttaaatttggtagtctactttcttttttttcataaatttcggagaagctttaccccaaacctgctagagaaagaattctgtaccatccaatactcatgggagaaaatagaaattagaatgagggaaatattatccatctaagagatatcctctctagtttaaatatcactctttatttccttctttccagatccccagggtagagctctggattgggaattggtttatctaggcttaacgcaattgcttctgcctttagatatgcaagtagagggtaaagaaagctattaagaccattatgacactaatagcttagtaatcaagtatttctttacatttttccaatgtaagtattgtactaaaaatcccgtttcaaagtgccaaataggtttgtatataaaaatggttctgaaaagaacaaaataaacagataccaatgaccggtcaatactgtttatagtaaagagtcttaatgtcaggcttcagctttagacaagttgttatattttaattattgatagctaatgttccattcttagatattcatttaattttgaactagatttagcttttaaatgtgtaaactgtatcttcttttctttctgcacagtaagtggcaagataaaaaatcgacaagactttgtttaacctcttacctcattgttcctttgccatttaattttataataaaaaagacaaaattatttaactataattaattatttattgattcactatgctgcctctctaagatatagaatagggtaaataactatagacataaatattttttaatttaattaaagactattatgagcatctatgagctaataaatcttaaaactgagatgaaatggatgaatactgagaaaaatatttaaaatgtcaaaattgagacttacaaggcttatggaaatttaaatggtaaaatcttcccatcccctcctcaaaattcaaggcccatattacattacacgtaaattctaccaaattttcaacagataatgaattcattttcttatacaaattgttccaggaaacatggaaagctatccagctaattttatgaggctagaattccaaaaacagtgaaggggaggaaaaagaaataaggcttatttcatgtacggctataaatataaaaattctaaatgaattcttatcaatgttattaaatgtgtgtgtatatgcctgtgtgtgtgtgggtgtgtgtgtgtgtgtgtgtgtgtgagaattgcatcaggactaagtagagtttaacccttaagatcaggaaaaagatagggattttccacatcaccactgctgttttacatagttcttaaggctaagaacaattctataagaaaacaaaaagttgtaggtgtaactactaagagtggctacaaacacaatcaacttctagaaatcagtatcattgttctacatcattaataaccaagtataaaatatagtttcaaagtattacagttgcatcaaaatttatgaagtatctgggaataaacttaaccaagaacactaagataaaacttttatggagaaaattttattttttaactctaataaaggacatagaaaatgatctgtataaatcaagatatttggggaccttggatagtaaaacctagtgtcagtgttcacaaattaatgtataaattgattggcattccaatcaaattcttttgatatatctatgcacttaatgtaaaagttacaaagaagaataaatgttcctgaatagcctagtttatcctgaaaaaaagaataaattctagcacatattgagatatgtaagaaataagataattaagataaggtaataatagaaatgaaaaatatagaaagctggacacacatacgttgacatgataggtacatagaagagagagcaaaagaatataaagataaaataaattaagataataatagaaatgaaaaatatagaaagctgggcacacacatatctagacatgataaatacataggagagagagcaaaagaaaaggaggaaggagactgggcttctatgtagattatgatattatctgtaaataacggcagctttatgtcttcgtttcaaatatatatttacacagtaaagataataccatacatctctgagaaaaggaatttttgtttaatagatggtattggaaaaactcactcactttataaacaaaaataagactggacccatatctaatatcatatatgaatgaaagtagatgtagattaattaaagatcaaaatatgaaaagtaaaaccataaatataaagctaaatgatacaaatatatttatctctataattcaagacaaaacctcaaagcataaacatttttaaaacatgatttgatgatctcaaaattaagaaaatatatccaacaaagaacatggataaagttaatagatatatgacatttgggagaatgcatttgcagtgtttcaaaccaacaaggaactcttatctaaaatatataaatcaggccaggtgcagttgctcacatttgtaattccagcactttgggaggccgaggcaggcggatcacgtgagctcaggagtttgagaccagcctgggcaacatggcgaaaccctgtccctgcaatacaaaaatacaaaaattagccaggcacggtggcgcatgtctgtagtcccacccagctactcgggaggctgagatggaaggatcactggagcccaggagacggaggttgtagtgagctgagatcgcaacactgcactccaccctgggccatagagtgagatcctgtctaaaaaataataataataaaattaaatatataaatcaacaatataaagacaagaacctccagtgtttaaatgggtaagggatatgaacaggaaatttacagaagaggaaacccaaaagaccaacaagcatattaaaaagatgtcaaatctgttagtaatttgaggaatacaaattaaaacaatgagatattattttgtatctcttatactggccaaaattagaaacctggataatactaacagttgatggagataaggacgtatagaaactgtcatgcattgctagagagtgggcacggatgactcacattaagtatgcactcccagttctactccagattataaatcccaaagaaattctcagaaagatccaaaaggggcatttatcacaggcttgtgtcatggggattagaggtagcctggtgtttgttaccaggggagttttgtgcagccatgagaagcaatgggctagtcacacagtgacacaggtagatttttaaaataatactaagtgagaaaagtaaggaacaaaatgaaatttttaaccctatatatttttatagttcaaaagtatatccacaaaagaatgagtaatattttataagggcacatgcaaacaaaaggagaaacattaaatacattatagttattgcccatggtggtggaaggaaatgaaaataggagatggagataaaagagaaaaaacacattttaaaagctcaaattattgaaaagtcatcattcccactaccactcatgattccattaggtattttattcaataatggttttactctaatagagataatagtaaatttcatcaaacctttctttagtggtatctataagatatatttgtaatgaatgcgcttagctgatcatgttggtaaaatcttcctttaaattatttatctgattccataactaaattgaattcctgtgaatagacttgagcagtagttactcaataatgaacctctatttactcattttttaaatcccttcatttattgcatcagacactgaaaatattactaaataattagactgacattttttcttaattgaatagttatagagaattgacaaaatcatttatacaaattgaccaaactaatatagacataatacagaattttaaccatctcttctttcagactcatttcctgtgttctactctgaactgttatttcaagatcgatgagatagacaatatagaaattctgtttgcctttagtatggaaactgttctttcataaaatgtcattgtttacattgctgaatgagaaacatccacactaattggtgtagatgaaatacaaaaaattttgaaaggaataaatcaggaaagggattgaagggaataaattactagttaaatgtgatcacaggaaaagttgaaaagtattatttataatattttatatacttaaaaaatgaaaagcagtttttggcaatcttaattcaagaaatcatttattcattaagtgaattccaaattggtttcaacaccatggaaatcacagagaatgactttgttcacatatttagtgaccgccgtaatttagaaaattgtcttacatggctctgcaatagctgaaatttacaaagctagatgtacagctcttttccatgttgttgaaatcagtgtcctctttaaatcactaggaagttgatgataaatgactgcagtaagtgagaggcgtagtgagccatgcaccatcactacttatttcacggacctgagcaagactccctacctacctgtcaagacacctctaggaagcttctgatggcttcttaggaaataaaaaggccttttttttttcttttttctgtttatggaaacttagtatgggccttgactctcagtaatttatatttctttcccattagctagcaaacatccaaaattgcccagtgattcccaaactgtgtaatagctgagttaattcatagtggaagaaagatattcccttctagtcatctcagaggtaagctggaggacttcaggcaggaaaataaatgtatatcagagtttctcataaaattgcttaatttcaaactaatatttaaaaatgagaaatgaaactgtaacatggtattaaaaaaggtaatttaaattatttttcttttaaacatgagtgtgttttaataagaaatttatttatgttaaatcatattatgtacctaatggagccaagagaaagtttagcattttagaaagggaaaattttcatttaggtctctgtactttcatttaggtgtctgtaaaatactactgaggtagtatttttccatttctaggaactgaagatctgatacatataaatcaagtacagaaatttaaagagcatattctcctttttatatatatttcaaagtaaaaaaaaaataaaaggatatgaaggtgtactaagttttgatggtctctcatttctttcttgactcatttcaggccctagaaagtgaatttgtttcttgccaacttcatcagtggatcgaccttatatttggctataagcagcgaggaccagaagcagttcgtgctctgaatgtttttcactacttgacttatgaaggctctgtgaacctggatagtatcactgatcctgtgctcagggaggtaggtgttaaatcccatattattccaaaaatttctgtcatctctcaaacacaaatttgacatttcatctctttctgtataattttgttttcaacataacttcttacaaaacagatttcaggttcttgacatatgtggaaaaattgaaaagtcccaaaacaagtaatgcaaccagtatgtggttcctttttaaatttcagacactttaaatatacttctatatctgtatatttgtttttcttacttcaaaatttacattaaaatatgtaatgctttacgtattttagtaataagtgaaacctagctgaatatttaaataggaatattccacattaacataatctgccactgtggctattcttaaaaataacagcacaagtgctaggattacaggttcagtggctcttgcctgtaattccagcactttgggaggccaaggtgagtgaatggcttgagcccaggagttcgagaccagcctggccaatatgctgaaaccccatctctacaaaaaatacaaaaattagcagggtgtggtggcgcagctgtgtggtcccagctactgtgggggctgaggtgagaagatcacttgaacccaggaggcagaggttgccatgagccaagattgcaccactgcactccagcctgggtgacagagcgagaccctatctcaaaaaaataataaatataaataaaaggaatatttctaccttttagacagaatactcaaaaacatgcatgaatgaaatagatgcagttatgctattttattcttatgtgttttcaatctgaaatgtttatagctaacagttgggaattatgtgctgtagtatgtatatagtatttttagtgaaaatattcatataaaatattacttaaatcatttctacattgcacaaaatgatttcagataagtggaaagagtgaagatgcaacagctgctacataagtgttgcttcaaggaagtgatatcccagtcttccattctaccagatatctgccatctgtcgtatgcaaaacaagtaatcatttctgcatctccagccagtggaatgcttttcttattttttattttaaaggtggaaaacttggagatgggcgcaatgaagctctacagaaaaatttgcattcataagtttatttcttatatacctctataaaattaaaatgactccatttgtatggttcaagcaaagaagaggaaaaggaagggaagagcctcataatcattgatccttggacccttagggcaaaatattctgagaacacgttgcaagcgtattattaggggcaatattgtaccatattgtgtgcacacaagataaaattattgcctgaagccaagagaaaaacatagagacagaatgaatgaatgagagagaaggcaggtgttatgaaatggctggtgaaataaggaattttctctacaaatcattacactcacccaactgagtatccccagttgtgtataaattgtaatcagattatttggtaggagataattctgagcttaattagtctcaactgtacacccttgcttattacatgcctgttttattaaatactttataaactattcttttaaggctaataccttttagaatcagaaaaaaagaaaacagttgtaatagttcatccttatattctaagatcaactgaattgtcttttgacttctaaatgtcataggcatttttgcttttggatattttgttatacatttttacccattataataaagtcctgttcttataaagaaagttgcaagttaatcctgttgggcaaaacaaattaaatacattaaacacaaaataaaataaattaaataaattaaatacaaaataaaatacattaagcatcttatatgtgatgaaagtgcaaggcagcattaaaattgacagaaaaatagcaggtttgtccaatttaaatgagggtttaaaaagagataactgaaagaatttgaaaatgaaattaaaatggaaattttctttacatggatacagtgttcattatttgaatcttatcaaaatacctgtttctacaaaataacatcattgctttggacagtgaaagaattgtgtataaggctttgttaatgtagaacttcttaatgaaacattacatagaaatgtaaaatttaaaatgtaaaaattaaaaattaaaaattgtcttctgttgaatgggaatgattcaagcatatgttggcatattatatagatggtctgaacaatatcttgtattacagcttcatgaccttctagtgatgcagactctctgctactagggtgcctcagctcaggactctgtctcctttcagcatgctcattcgaagcacataattgccagacactcaggtttcattagagagacccagagtcatactgtgaaatgttatgttctttctccccagaccccttgcccacttcctcaaccctataattctgtgtcagttcttagaacacgatacatgtgaaggagcgcatacctggaatactcttacttcccttcccccagcccccagaggcctgagcacacatcagcagagaggtttaccatgaccctgtggacctgtgtggactcaagattgcttaggaagagcctctatctccttgtgaccactagggggccatttagtacagtgtagacataacagattaaatgatttcaaggaatgctagttaatttcccctttcccacttcccaccattcccccctctaacatattcccattgctgttaatgccagttagccaagtagaagctaacagattcccacaaagacagttctgcactaacatttaagaatgtgaggaatagtgtcctccaaaggacgagagcccacctgaatcctgtgagctgggtaagtgaggccgagtcattcaatctcactttacctcagttgctctctctgtaaatacatctattgttataagaaagaacccagataaaatggagtgaagtacagcatattcattatttagtggtcatttatgcacccttacctatatacaacccctatgagtagaccatgtgggaggcacaatacctttttttaaaacattcttgttgagttcctggaggtcttgtactgctgtgttgcgacttgagagagttgattcccacctaagtggttggacacagactcttggaaaaagcagagtttaagatattaacccttttattgagctcaatacatttattttatttgataatgtttatcttagtatttttaaaatacaaagattgtacatttcatatagataaaaccaaaggaaggctaattatggctacactaaactccatctagcctaagatggattttttcatgcttaaattaaacactaatttaaaaagagaaatatttaatatatgaatatctatatatgtctcctttgtaaaaaaaaaaaaaaaaaaaaaaattctactacttgcctataactttgagttttgaagttagtgctaaagtttgagaaatggcttaaggttattgattcattctttcttgacaggtgaaatcatgaagcagcactaaccacagcaattatggcattaaaatgtcaagaaattagaggtcagaataacagataattttcttctctatgtcagattgaaaattgacattctttgacagtttaggaactctggctgagaaaattatgacagcttaacttattttatacttgtaaagcagtaattgataataaactttatcatgacagcctctgggcagaaacatgacagtacagttctggtacaaagctcttcttaatatgtaaacactagatctgttggatagtagatattatttaaattgtctaaagtcttggcttacatcgtaatcttctatgcactttttttcatagatgagctgtactatttgagcagtttttcaagcattataaagaatattttttcttatcggtttttatatattaataaaaagtatatgatctgatttatatttttacttactaaatgatgaccaagaaacttcatcctatgacctgcttaggaaagagaatattctggttggtaatcatttagtcccatggttttctaacaccttgatgctcaaatgtggcccataacccagcagaatcagcatcacctgggaacttgctagaacttcagcctctcagccttccccaacctactaaatacatgtaatgagatccctaggcaacttgtttgagacattaacttttaagaagcactgctctactaaaggtgtgttagaatcatttggaaagctttttttttttcccctacaaaagtacagagaatggtataatgaacctccatgtacctatcacccaatttcaaaaatttaaaaccatttcatcaaaacctcacccctccccttgtattttttttctttctttcagagacagtctcactctgtcaccaaggctgaagtgcagcggcttactgcaccccacctcccaggttcaagcaattctcccacctcagcctcccaagtaactgagattatagacacccacaaccgcacctggctaatttttgtatttttagtagagacagggtttcaccatgttggccaggatggtcttgaactcctgacctcaggtgatctgcctgcctcagcctacaaaagtgctgggattacaggcatgagccactgtgcacggcccccctgtactatttttaatacacatgtcatacccatctaactccccatccactctatcctccccatcacatgggcatctcagaatatccagggaaaggcttcaatgaagcaagtcttattttgaaaaaaaaaaaaaaaaattatctgggaatttcacacacattcccaattaaaaaccattaatctagctaacactctcattaaataattttttgtttgtttgttttgagacagagtctcgctctgtcgcccaggctgaagtgcagtggcgcaatctgggctcactgcaagctctgcctcccgggttcacgccattctcctgcctcagcctcccaagtagctgggactacaggcgcctgctgccacgcccggctaattttttgtatttttagtagagatggggtttcaccatgttagccaggatggtctcaatttcctgatcttgtgatccgcccacctcggccttccaaagtgctgggattacaggcgtgagccaccgcgcccggcctaaataattttttcagctgggcgtgatagctcacgcctgtaatccccacactttgggagaccgaggcgggtggatcactaggtcaggagttcaagacctgtctgcctcagagtatgattatattgtatgccataggcaacaaaaatggatagaaagatgggaatgatattataagttgtatcacagctcaaccattagtatttgagtgacattaagtcagtcacttgaattttatgtacctgtattttctcacctaaaaaattgatgacagagatgatacctaattcatgggagaaaaatatgtgaaaatacttaaactataaagcactacacaggcattattacctaaaggcataattaaatgaagttatcttagaagaacttttgttttaataatttcattatatatgacaccaaaactatcaatttaattttaaaaaatctgttagcaacagagaaaataagttaatttgtttttaatattatttagtaaaaagaagcagttgtggcttttaaatttattttcaatactgtctccaaaattttataaagatggcctaattgcagcccacttattgcctgtaacattctttcttgatctaaattagtattagcatttatatcctttattatcctttatatttttaaaagttttacattaggccaggcgctgtggctcatgcctgtaatcccagcactttggaaagccgaggcaggcagatcacgaggtcaggagattgagactatcctggctaacacggtgaaaccccatctctactaaaaatacaaaaaatagctgggcgtggtggcgggcacctgtagtcccagctactcgggaggctgaggcaggagaatggtgtgaacccgggaggcgcagcttgtagtgagccaagatcataccactgcactccagcctgggcgacagagtgagactatctgaaaaaaaagttttactttagtgtcattagttttgtattcatattatcaaatgaattagcaacactattactggcattaaagttgtactggttcagcaagagaaaaaaattgagtcagtatttcaacagaagctgtaagcatataccagacaagttattaacaagatactaagttctgaacttgtcataatacttgtcatcattctatagttgacgttgccagactgaaaatgatttcaatggcttctttttaacggtgagaggtatgcacataagtctatcataaaaggctgttttgctggcagctattagaacatgtgagccattgcaatatttatttatagatatacacatttatttatgctggaaatattaaaatattaagtagtttttaatattaccaacagtcataaaaatgtggcatttttagtctaattttctgttaatatttcttggctttcttagcttatagtttctttttctatctttttctcaatctgacagggataacactgcctccctttggatcggctatggtgaaaatatgcccataggaagtaggctagattacttcagtttttactttattttcttgctgaaatattccttgctactacagagaattgacatgatagggctgtcaagaaccagaagatagatgtgtctttaaccaaaacagctgcaatgctggcttttctgagaagatgaattcataaaatttataagacaaaaaattaacacactttttcatcctgatgatgtaaatgaagggtaatttaagggcccataatgacaacattgaggacctctacaatcattgtcttccttgaattctttctattattctttattctttctatgaatcctttattcctcagcctttcctccccccatttctgattctctttgatatgacaaggaatatcaacaccacctgcccgatctgcgtgaatgagttgtagcacaaggttatccatttacaactgccatgatgcctaattgtcttcatatgggggatatccagggttcttctcctgggcagttattctgagaagtgattgcaacaaatgatcacaaagtgggtgattaagatttcttaaaaccatcttaatttccccctataattactgcatgttttactgggatgaaaattttaacagattcaaaagccaaattaaaatggaaagaaaacccctacattttaattagtggagtgaaaatacgtatttggtgttctttaaagctaaaggatcattttgggaacatgaaaaataccatgattcctaaaactaataaggatataggttcaaatatatttgttatgtgtttctcactgcaaaggttttcattgagagccataaggcttgcattgcaaaggtttgatgaataaggttttaatatagaaattagtatcaaggaaattaatgacacacatttaattttgattagtgaataaatctttaatttaggtctatcttacctgctcataattactgcagtacttcactaggccatggtcatcaatcgtccactagaaaagcataaataatgcagctagtcaaagttggatgtatgtcatttatgtgacttgtgcttctttcttcgctttgtgttatttttattgtgtggtgttgagaagtgctaattattgattttcagaaattaacagcaagtactttcacaagcatctaaagccatattttactcaagggaagaagggtgaaaattgcagcctgctgtttataatagaaatagctggaagggatttccttatcttctattaacatagatttcacttctataacacagttgttacctcagcataaattaacaattattcaaaacatattgcatacttcaatttgttgaaatagatattactcaatctaagtacctagacatttcagttagatatttagaactcatttttaaacattttaaacatattgataatgagcctatttaaagccatttgaagtctcagtacagtatatctaaattactgttgcccatttatgtcaaaatcaagaatattttgttctgctgaatacgtccaataatactttattctcactttagtatactaaaagtatatgatttcaatttggaatatttataccagcacctggtaaacctgtgtctcaatgtcattccacataccaaacaaatctatttcagctttttaaaaaaatattttcccatgattaaacacttctagtgaacttataaaggccaccacttctctctcgttcctgctcctacaccaccacctccccctcaacttgttttcctcctccttcacctcctgaatcagccagcatagagtttagtttatataaacttattcaaccagggaaaatttggcagggatgtcatactgattgttctcacctgtggtaaaggatttgtggattgagtcctctacttaggtaccatttaatgattaaccccaaagtgggcaaagaaccagaaacctggaagaatccttaagcgatcatctgctaaaatcttcgcttccaggtaggcgaatccctaagtcatctagaaaagagtatttcagttctcttcctgagtatcaacaaatatttattgcaatgagactctacagcctttcctatctgcttacaatgtttatctctgaaatatttaaaatcctcagtgaaaatgccccttgcttggatataatctttttttggtcattcctaccccaacatgtagcaaaaggtaaccagcatttctctcatttgttgtgcctgaataacaatcctatttgtatcagtcaggatctcagcacattacctttcaaagcgataatgaagactccaaagaagacatacacatgaccaacaagtatgtgccagcatcattcatctttagggaaatgcaaatcaaagctgcagtgagataccacctcacacccattaggttagctactatcaaaatagaaaataacaagtgttagtgaggatgtagagaaactggaaactttgtgcaccattgataggaatataaaatgctaccactggcgtagctgctaggaaaaacaatatggcaatcgttcaaaaattaaaaatagaattccctatgacccagcaaattctacttccggatatatatccaaaagaattgagagaaagggcttcaaagagacatttgtatacctatgtccacaggagcacttttcacaatagtcaaaagtcgaggccaggcgcagtggctcacacctgtaatcccagcactttgggaggctgaggcaggcggatcacaaggtcagggatttgaaaccagcttggccaatatggtgaaactccgtctctactaaaaatacaaaaattagccgggcatggtggcaggcacctgtagtcccagctactcgggaggctgaggcaggagaatcacttgaacccgggaggcggaggttgcagtgagctgagattgcgccactgcactccagcctgggttacagagcaagactccatctcaaaaaagaaaaaaaaaaaaagttgaaagcaacccaagtgtccgtggatagatgaatggataaacaaaatgtggggtggtgtatgtgtgtgtaatgcattattagtcaaccttaaaaaggaaggaaattctgacacatgctacaacatggatgaaccttaaggacattaatactaagtgaaacaagccagtcacaaaaagacaaatcctgtatgattccacttctatgaggtatcttaacgagtcaaaatcatagagaaagaaagtggaatagtgacccccagggactagagggagtggcgagtttttgtttaataaatatagcgttttagttttagaagatgaaaagagttctggagattggttacacaatagtgtgaatgtacttaacactactgaactgtactcttaaaaatggttaagatggtaaattttgtgttatatatattctaccacaattaactttttttaaaggataatgaagagagtttaataatggttctatttacaaaggtatagacatggtaaagtggatgaacaagggaaagcgacaaggaaagggagccattcccagaatctggcaataaaagtgctcacccaacaagagctgtggccttaggtagaggagtactggccaggcactgccaaaacgggacttggcagagaggggccatataatcctgtctctgctcctgagctctgtcattggctgaacccactgggaaggtagagagcaagggagcacaggtctatggaggcgcatcttccagagccaaagaaggtgtccagctcactggtctgttccccctgggttgttcatttctctaggccaagaagacttatttaaggcttccaggcttgctcagccacaatcagctacattaaaatgcactcactcttcctacctgagttgacttatacttattttaagtggagaaattgagtgagcttgtcattgatggcactgatctgatttggacagaaaatattctggatggagcattttctctccggaggaaatgatgcttactttttcacattcatttgttaagtcagttatgtaatatcaccattataattcaacatgccaaggaggaaacagggatcagcaagaggataagtcacatcttaattctacttagatttacgctaaaagaaagaaaccaagaattaaggcaggtaactggacaaatcagaatctctctctcaaatattgtctaagtgcatctactaattaaggcaattgtggtccctttttactcggattaccaaatatttgcttaaatattctaataattttgccaggataattttagccttaatgcagttgaaggttaaaacaaaaggaaaaatatttattctcctattttgtggtttctatgaaaaactagaagcagttgaatataaaatagcattttaattttttatatagtttaatatttataaagcaagaaacaacaaagtgcagatattatttgcttgatttattttgctcctgtttttccagcattaaaaagtaatgctttatatgatcttgttttattacaacaataaaccagaagcaaaagcttatcagttaaaatgtagtctgccattaagtaacctttccttttatcatttcagacttaaaattccattgtttttgtttatttttttcctatttggcattggtagaattgcaggtggaacagaaagatgatatcaatcacatgtatttttttattttgtgtcaagcttgtattttttggtttaaaaaagagcacttttaagtattaaaagccttgtaagtaagagctatacagtgagataaacaaaatgctaaggaaactttgaaaatctttttctgttttctcaagcaaccacttttactacttttttcttgaattttctgaaaattgttagtgaatttactggtatttggacgtagtttgatattttgcattgtgggtaccataacctatagtactttataaaatgctgatttttctgaaaaacaatttaaaagtttatacagaccagggagatggatgaataggtcatttgagagcctgtattattagctccttcatgctgtttgtcatggctctgtagacctgacggcatttcatctgaaagataatactgaattacatttaccaaaaaaaaaaaaaaaaaaagcagttgtaatcattctatggagaaaaatgtaaatgggttaaatctacctgcaatgtggaaaagacaagattaacgaaagtttttgcctaccacacaccagagaaggtatggcttctgaattctggcttacttggttgccacatttaattttaccttagtaggaagtcttttatatgaataagcaaatgtgcaacacataagcacacattatatttatcgatttccttttctgaggattcaattccaggtatgtatctttattcatagaggaggtagaacttccttggaaggaaagccaaaaaggaaagaaaacaattaagagatacggaggtcaaagaaagaaggcatgtgtcacatcatagctaacacacatgcccctttgtgcacactttagaggacaccttctctaaatggatgaattacaaaaggcactcctttctctggctctccaggtagattctattacttatttgccttccaactgggcatctttgtacagggcataaacagcatacccatgcacggtggccctgacctatgagaaagaagaaagactcaagagaacttgttaagtaaggaaaaaggggactcccatgaagatgtcataatttcgtaacttagtaggtgggtcctgcagaattgtataaaggagagcctcatcagactaaggaatgggataatcaggaagtagggaggggacaaaagagaaagtgtccctaatcgaaacttttccttaatgggagctctatatacagataagcaggtaaaactgagttatgtgtcatatatgtgtttgtaacctgaaaatcatttatgctgttcagattttcttattttgttcatttgtgcataactcacttcacatttatctttacttctctgcctatacctacaaaattccatgttttagaacttcctcaaggtgttcaacctacctatttctcggtgagtcttagctggagagaaaaataaatgctaagtgcatgatgtcagttcaataaatattcagcaaacaattttataatcagtaagaatccatataacaattaaaatttaacactctttaacttaattttcatttctactttaacaattccaggtaaagaaataattattataattattttatgagacaattgagttttgatatatacaagttttattaataagttatcagtaccctaaaagattacataatgtaaatcattactttatttacagcttcgaccattacattttgggttcacaaatacttacagaaaataaatacacaaaaccattttggagaaacactttggcagtaaaactaaacttactcctaccctatgactcaccaatcccatatctaggtatagaccctccaaaaactggctgctaacctccatcaaaagacatgtacaagaatcttctaagcaactttattcacagtaacctgaaactgttaacaacccaaatatccatcaacagaattgataaattgtgttaggttaatacaggggaatactatacagcaaaagaaaaatgaacaaactaccgatacatacaacaaggttgaatcttgcagacataaagttgatcaaaaaaggcagaaacaggaaatatgtagtgtataactcaatttatcaaaaattcaagaataaaaaataattgatgataaacatcagaataattattagcttgacagggtgatggggctagatagggggaataattggctggggaggcacacaaggttaccagtatctatgtattctctcatgtacccaccacccagaccaagatatggaaccttctagttccattccaaagtcctctgtcttaatgtagatggtggttagaagaactgaaaaaatgtatatacatacatatatacattcatcaagctgtacacttaagattagtgtaccttatacacttttatcttaaaccttaaaaaatgagtaatttgaataaataaataaaagtgaatgcacataataagcttaacttcaggataccaaaatcagtgatttcttaataacattaagaaagaatattatttaagtacaagcaaatctatattttcatgttattctaccaaagtgttgtctaccaatggctgcatggtcttttgtatttgtgaaacatcaaacgttttgttagccacatttgttttaaaaaatctagtggtttaagcctattacctatgctggctttgtatgaaatatgtaagactcatgataccactgtttaagtaaaaagtcactatgatttattgattctaagatgcacaccattttcatatctcaatactccaaaatcataatgtgtcttacaatcaatcaatcatagcatattttaattgatagcatattttacttattaatagtatataaaataatggagcttctaataatggataacatagatttaatgaagttggattgatggacatttccaaagttttagtctctttccatatacattatacatgctcatgagctcacgtgttcaatgttaactcattttgggtttactggaaagtacaacagatacacaaagcaactgatatcttgtaatacaaattaaagttttcattattatattttaaaaggattcacaagccccaaagcatataagaaccagacagggaatagatgagtgacacaagccagtggcagtgcccaggtcatgtgagtggtgggcgttacaaaagggcagttgtgcaggaatgctgatgtggtattgcctgatctgcgaagtttttaagagaagccaaaaaatccaatttcttgtatgccatttactgacctgtaaattttggctcaaatagaaaccatgtctgtgagctgaatctagcccatgggatgccagtgtgtgactttgggctgaatgtaagctctttgagggcaggaatctttatctgtttcattttaccagtatcattaatatctagaatggaatctagtatgtagtaggtactcaacaaatacatgttttgtgaataaataaagttaacgttaaatctcactgacccttgcagaccaatgtatagagaaatagatacatgtagaatttttttaatgacatttctggataatatagaaggaattcatctcacagttccagtagtttctttttttttttaacttgatatatttggaaatttttaagggaaaatttctatatggtagaaaaccttttcatgctgtggacaagctaattcttacttaatcttcaaacctgagctctgtcctttttccaaaagtctctttcctaagaacctattccccttcccctctgtcactcgtctgggctcccagggcagcctgggcttgtctcccctgtgtcctgctccctaccatgtgcactgacacactcatcgtctttattttgggggctgctaacttcctgaggtcagcctggtatctgactttgtatcccttggcatagagtaagcattcaacaaatgtctgttaattgtttttgtggtattgaattgtaaaagtaaaaaattctgaagtgcttttctttttctagaccaggtttcagttttatacaaatgccctgcttctgtattcaccaaatatttttagaatctctgttaagactaagtcaccatcctgacctgcagagattcagtctgaacaaacagacatacataaataattgtgtgttaaaatctatagtaaaggagaaaaatgtgctgtgagaatatgcagggcattcattatgatttagaaggatttagatccttgcccaaggaggtgaaggatttagatccttgcccaaggttagcattcggggaggattttctcctacacagggagtagctctcagaacaactacttcattgtaacaattcatgggttgcagaatgagttctgcgtgtcaccaggcaaccctcccattcacaggacctgcacacttgacaagaaagtcattgatgacccccttaaagtgggaaaggacagaaaatcttacatggggagcaggtgaagaaagatagtaggtgctcactctcccctcaaacgttttagtaatgacaagaagtagaacttaaaggagacagcatgcttttcaagatcagaaagatctgtacatttttaaatcagagggtaaggaattactggaaggcaggactaccagatagctaaaaggtaaatattggactgagatcctttgggtcatgaaggcatgtaaagtagatcacaaggaagagggagtcagtatagtctcaaaagaaataaacgttcagtgtcgagaactgactgtcttaatgaaaggataaagttagtcacaatctcgtctttatcctgatgcctgattggggaactcttttaaatatatatgcatatgtattctgccttagtccaaaatggtcagagttgggactcactgaagagaactgcacagaagatttctagaaattttatccatttcataacattttctagtacaatgttaatactttcctttaagaaacaaaactagagtcaagcaaagcatgtttgttgactaattccttcaataaacatttaaaggctccctactaagtgcaagacactgatctagagattaaaacatgtttaattttacccccggctcctcgcccccacttgtgtcctttttctggggaagtaaaaacaggagtagtagtatctgttgttagagagacgtttagctgttcatgatacatgaagctaggtattaagcacttgctaaccagggcagcgttaacaataaaattaccacttttctttgcaaataattctcaagagttagttattaaaaatgtgaacctaaccagaaatggtctcttcccccttttataatcataaatcttgcactggggagacaaaagtaggatgtaaatgcatcatatgtgaataaaatttagttaaatagtcacacttgtgagtagacaccatgcaaataaatgtatacataaaaattggacagcacttaaagagatttaataattcatcccattgcctctgcagataaaagaaccaaagtcccatttacgcgatggctaaaatatggcagataatgatgcattcatatttaatattgctaataaatttgcaggttcgcatttttattgataaacattttcttgaaatacagtgtaggaggacagatttttaaatttaagtactttataaattagaattgtagatagcgatgagattagtggtggtgctatgtcaagagccatctaccaactcacctgtgcttctacaagcacctagctatgattttcctatttcacttttacgtgcaaccaaattgcacacaatttagggaaaaaattagcatggtagcagagtaatgatcatagtaaatatcatgcttctccttgttgacataaattacatataatatttcagaaaaagatttttgttagtctagcttaatatatggaaatattttgcctatagaatttatgtatcgaggaaatacttaagtttcttttaagatgatctctttgacacacacaagaaaggtatattgtacagtccagacagtttgagggctaaaattatttctattccttggaggctataaaatctcatttccagctacacaggctttaatgaaatattgtatagcttaggatacaggaagatttatttcttttttgggtgagttctctctaaaatttcagggaaaatttttgagaaaatgaatttataccttaaaaataatattccagaattcatcttaaaatagcatagaaagctaaaatatatttttgtaacaaaagttttgttatatttaataattctataaaatcttggtgttctttctgctgatcaccctctgaattaattggaacctataactttctgaattttattttgtataattggtagacttcatgtctcattcttttttttccccattaagattccagaagcttatttcattagagacccccacactttccttcttacaaaggactttattaaggtatatgttctgtatttagtgtggaaagtgttctttggtctttagctgcatgcatgtattcacaggttagattttccacatttaaccccagcttctgggaataagaatagtgactgggttaactgaagcatgtttggaaggagaagcaaagcttgtctacaaaatactaacacttggatgattctgcaccctgagaaaagagcacccgttgaattttctggactttttttcatggctgacttgggatacacttgcgttgtcaaagagtgtgttggcctctctctttgatgcatattgattatgacaatcaccctccttcccctgcaggccatggaggcacagatacagaactttggacagacgccatctcagttgcttattgagccacatccgcctcggagctctgccatgcacctggtaagacatatcagcatgttgagatttttttttctttcctttttacctgggaatagagcaaataaaattgtgattttaacagcatattttaaaaggcttctcgatttattggttaactcttcagcctaagtacaaactaataccccagggagagacagagaaggaagtgtaaatctacctttaagtcctacttaagctgtcccacttttggattcacaaaaatagccatcttctctatgtatgactctacataaactcattcatgcacacacaggcatagagacacacactgacaccagaattagactatatttgtaaattacaatgaaaaatgtattgcagacacaatatgatattgccaaatttcgtggcaagatacagtaggggaagtagttcatttgaataaaaggaaagaaatataaaggtaatttgtggttattacagagaggttgttgaacagagtggttaagagtaagggccccagagccggacagggcaaacaccatctctgcactagctagtaaatgacttgggcaaggtatttaacctctctgtttttgcatttcagcatcttcaaaatagaggtaaaaatagtacctactactgagaattgaatgattcaatactgtatagcacttagaccagcacctgtcatacaataagttcttaataaatgtgagctgacatcatcataattagctactggttaaacctcttattcccactttgcaagggagtcatattcttttcattttaatctgaatttaaaagtccatttccataaaaaagtttctttacagtttattagcaaatagtaaacattttcttctttaagtaatttgaagaaggtaaaatttttatgagcaatttctttagaattttttttaaaactgatttttcactatttttttactgaagtaaacaattcttgaaggtaaaaatgcgttcacaagatgaacttcaagacaacaagtactctaattttagagtaaagagctctggaatatggtccataatatatgtgtaaacaaatgtataaggtgttattttgtgatggaagtattaatcacacctttcatttactctgtcatttaacgaatttttattgagccccttctgtatgtcagatctgatgctaagcactggagatacagtgacaaataagtcctctaaactttcaagaaatcagtagtcgaacttttgggaaacacataaatgctttttgttgttgttgttttgagacagaatctcactgtcacccaggctggagtgcagtggcgcaatctcagctcactgcaaccttcgcctccctggttcaagcaattctcctgccttagcctcccgagtagccgggattacaggtgtgcgccaccacccctggctaatttttgtatttttagtaaagatggggtttcaccatgttggtcaggctagtctcaaactcctgacctcgtgatctgcctgcctcagcctcccaaagtgctgggattacaggtgtgagtcaccacgcccgacctaaatgcatttgtttttaaatttttttttaagatagggtctcactctgttgcacaggctagaatatagcgccatgatcatggctcactgcagcctcaaactcctaggctcacacgatctttcttcctcagtcttcctagtagctgggactacgggtgtgtgccaccatgcctggctaaatttttaaaattttttgtagagattgggttttgctgtgtttcccaggctggtcttgaactcctggggaccctcagtctcccaaagcgctgggaatacaggcataagccaccatgcctgcctggtgtgtgtttaaactctttttttttttttttttttttttttttaccttccttcaacagctcagccaaacagcttcagcctccttggttagtcactagtgaactcttttgactgcagttggtctttctgtgtaactaaacagaaaggtttgcaccaagctcaggctgttgccgtataaacccctcagccacattgtagacatagagatgtggcctcggagcctcaccgtttttaataaactgtccagaagaatatctctaacactttattttatgaaatgctttggcagaagagttttattcccgtgttagttttctgtgtttaataataataataaaaatatttatcctggagatatgcccagtcagaattcattactttcctagaggaagttgttagagactgaattggcatgaaactgtttataaagaaactctaagctttctaagttcatgtagcagagaattcatatatactgcaaaccattaagaaacatgtatgaaagctaaataatggttatttccagcctccctactttatgtttttaatatggtggtatttgtagtgttttgtaggacttacagtatctactttctgtcaagtcatatgctagatgttgacaaaacagacgctaaaaacagaaagaagaaaacacatggacacgtgacagggaacaacacgcactggggcctgtcatgggggtgggggtggtgggaggggagcatcaggaagaacagctaatgtatgcagggcttactaccaaggtgatgggttgatctgtgcagcaaaccaccatggcacacgtttacctatgtaacaacctgcgtgtcctgcacatgtatcctggaacttaaaataattaaaaaaaaagaagaagaagaagaaaaagcattggccctccataagctcccagcctagaagggagaaacaaggcttcaaccataaacagtcagtgccagagcagaacctggggagaactgccagggaagcgctcggctgctttatggggctactgtattttaattatttagactgtagtcatgaccccagatcaaccagatagaaatgaaagtattagtcaattcactttatatttcgtgtaaaaaatgggagtcactaatttgactaactttcccaccaaactgatttttaagctgcattgcataactgtgttacgtcatgtgggtgtgtctatgagctaacttttcacattgcattgtggtgatatttgaattgaggctggtctttaatgattctgtgtccctgtatcagtgccttcacagaattcttattctctactctctgtgccattccccagtcaaagctgctcgatttggggcagacattcaccagtatgaaagtttaggtggcttttcctccttgtgtgtgctcgtgctagccttgtctgtttaacctcattctccctagacctttcactaactatgttattccttttgtcttcctctgttctcttccctttctattcaacagtgtttccttccacagagtccgctcatgtttaaagatcagatgcaacaggatgtgataatggtgctgaagtttccttcaaattctccagtaacccatgtggcagccaacactctgccccacttgaccatccccgcagtggtgacagtgacttgcagccgactctttgcagtgaatagatggcacaacacagtaggtatgtgtgcctgagcaaatcacttactaaagatttcttaaaagctacaattaaagtaaaaaagtgtactgggactgggattagctcatatcccacattatctacaaaaaacagcagactaaataaataattgtcaaatccaactaagggacttctatctgtctccttcatttctgctgtatgttagtgcctcataggatgcttggatcatagtcaactactcagtaactatttgacaaattgaagcagttctaccaataattcaggttctcctactctattctgctattgcctaactgcaaaaaaatacacccttcttttttcctatatcaaacagaagagagtttgaatatgggtttctggatgctggcttcacatcctcttgtctctatatcagtaatttatttagcaaatatttgaatgactattatgtgtcaagtagtcccaagcactgtatatacagcaataaacaaaacaagcaccaactctatttttgcagagcttagaatctttgcaaaaagacaaaatctaaattctccagtgatttcacacttcacatgtgtttctccaaactctttcctgaaagtaccagccagtacatcttgaagcgacataacgttgtggcaaacatttagacatattgcaggagttcaagaccagcctggccaagatggtgaaaccccgtctctactaaaactacaaaaattaaccaggcacagtggcaggcacctgtaatcccagctactcgggaggctgaggcaggagaaacgcttgaacccgggcagcagaggttgcagtgagctgagatcgcgccactgcactccagcctggacgacaaagtgagactttgtctcaaaataaacaaaccaacaaatcaaaacacatttagacatatggatgcttaaccagggcagagtggatgtgaccaaatgatttagttggcccagtttaccacttgggatctcccaggaagccgaggactccccgtctccagagttgaatagctgagccatgccgaagtaacctgaatctttctattttactgacctctacattgctctaaaaaatacagtgatttatatcctagctttatctcctaagagtttctaagtgcacctattttaaggttattggtgatattatcaacgtaaggtaacgctacttccattccatcagagataggcagcacatatcttaaggaaaatatatgactgtattattctcaggagacagcctctagaaatgttttgcattgagaaaaactacaaaggactaaatttttatttaaaattgtttgaaagtgttgtatatattgtataatcacgtgtgaaaaactatgactaatgaacttcatcaagctctaaacattaatcctctgaaagtagcttttagtgagattaagattttaggtgtggcccaatttttataccttccatttacttgtcacatgttgaaaaaaaggccccattggatgggagccccagcttcctgtgtcctgccccaggtgagcgcaggctcatacccatccctgcttggaagcatagccctttcattgatttctgcttcctgtgtcctgccccaggtgagcccagcctcatacccatccctgcttggaagcatagccctttcattgatttcaggctcattgattgctcatgaccttagctttttgatgggttcaataaatgttacaatcttctatttatccagctttttctcatcattagaacagaaacaaaactcttcccagccttgtacatcgtaagtggaaacctgaagtccctgttgtgattattttgtaaggctgtctacagagacacatagtatcagaacaatttatcaaatcatttttaagcaaatatgcattttgtaaaatcatcataaaacactacccattaggaaatcccttctttctgagaattttatgttagtttttctctctttttttaatctttaggcctcagaggagctccaggatactccttggatcaagcccaccatcttcccattgaaatggatccattaataggtatgttaataaaaaagaataaattttcatggatactatccatatattcatatatagttatttttcataagatagttgaacaatattttttctaccacaagattaaaatgctaataatatcaaattatcatcaaggagctgtgtaaatcataatatgccatctaagaactttttggtattaaagcaatcgtttcttgatatttttggaggtcatttaagttggttataaataaggcaaataattccaaactgtattttctttcagcctaaagtgttctctaacagctcagtattatttaaaatataaggattcaaaaagattactaaaggctgggggaggaatagcattaggagaaatacctgatgtaaatgacaagttgatgggtgcagcaaaccaacatggcacatgtatacctatgtaacaaacctgcacattgtgcacatgtaccccagaacttaaatttaaaaaaaaaaaaaaaaagggccgggcatggtggctcactcctgtaatcccagtactttgggagtccaagacgggcggatcacgaggtcaggagatcgagaccatcctggctaacacggtgaaaccccgtctctactaaaaatataaaaaaattagccaggcgcggtggcgggcacctgtagtcccagctactcgggaggctgagggaggagaatggcgtgaacctgggaggcggagcttgcagtgagccaagatggcaccactgcactccagcctgggtgacagagcgagactccatctcaaaaaaaaaaaaggaagctaatattgaagaacatcttttctggcagtcttttttttttttttttttttttttgaggcggagtctcgctctgtcgcccaggctggagtacagtggcgcgatctcggctcactgcaacctccgcctcccgggttcacgccattctcctgcctcagcctcccgagtagctgggattacaggcgcccgccaccgcgcccggctaatttttggtatttttagtggagtcagggtttcaccgtgttagccaggatggtctcgatctcctgacctcgtgatctgcccatctctgcctcccaaagtgctgggattacaggcgtgagccaccgcgcccggccacctctggcagtctttatcactgaatttttttaaactgacatgttgtaaagcaaatgtttcatatgaattgcaaactgatgagctataactctttgcagcagacattcaaaatatttttaaataatcgtgtacatatttattagccattggatccagagctagcatcttagtctttcgaggcccttccggtttcatatatgtaagacagtttttaataatgtttgttctatctgtatcactggatgattagtaagataaattagaaaaaaattgaaaatgctacgaaaaattattaagctacatattaaagtcaaggtgttttattcttgggttcttttttttttttttttttttgagatggagtctcattatgtcacccaggctggagtgcagtgatgcaatctcagaccactgcaacctccgcctcccaggttaaaccaattcccccacctcagcctcctgagtagctgggattacaggcgtgcaccaccacgcctgtctaatttttgtatttttagtagagacagggtttcaccgtgttggccaggctggtctcgaactcctgaccttaagtgatctgcctgcctggccctcccagagtcctgggattacagacgtgagccaccacgcgcagcctcttattcttagattcaaattcatccttcgtctttgaacctggaaataagataagatacagacgtttcaattagttacttatacccatacacaaaataccatttacatgtctttgggagcttataagctttaggattaagaatattattagtctagtctagctatttctctttccagtagacattgacaatgaaatatacagctagtgtgtaaccatggaaaaattaataggtctattctaattagtaaaggaccaactgtatagttttcaagtggcctgggacccttggtcttcttgtccttactgacttttgtgtataatatttttattgcttatgtttcttagtaattatttttatactgttagtagatatctacagatagtagtacttaatatttaactggtgttagagagtggtggtgaccttctacatctgcatttctgtttaagaattcagcccagtgatttatcctgaaaggatggtgcgcagtaagggacaggctggcatgcagacaggcactggggaaatcagatggtgtctctgagttcctgactttattcagattcaatcccagggctctgcactgattctttgcctgtctctttcctccccagtccctctctcatcttttttgttcctctcctcccctgctagccctttctggaaaggccttctgtctgttgacaatccaggcctgtaaagctgctgacctgaagctccctgtggggctgcccacgtaacaacatcccttgctcaaatctctaccctcctttttcacaggaattataaataccatctgaaaatgacagacttggggcaaatattaatatatctcttccttaataacatacttcatacaatatttagttttcatgtgattcttataaactaatgaacttgtatatagtgaacatctaaagaattaaatgcattaaaatattgtattatgttttaaattaattgtcttgaattcctcatattgtttttattggtggagggagaactaaaatttctggcataattttaaaatacataatgtggttcataaataattactgcgaaggaaatttatattcctcaagggagaatcttaataatctcataccattaaaaaaactatttctggataaatgaagcatgaaagtattgttttccttctttgagtgcttggcaaaactcatatggaatctttcttcaaatgcttttttccatttacttttagccaataattcaggtgtaaacaaacggcagatcacagacctcgttgaccagagtatacaaatcaatgcacattgttttgtggtaacagcagataatcgctatattcttatctgtggattctgggataagagcttcagagtttattctacagaaacaggtaatcctaactatgaaacaccatattctcttcaaaatgactattgttaaaaccaaagctgaatatgaaatcatacttaatgtaggcatttttatcatttgccaacttgagtagtcaagattcaaattaaatgttcacattgtaagcaaagtaactaactataacttcatgtattccgaacgttagcatgatcccagaattcataggacaaatggggctattgttcctttcccacaaattcatatgcagtaaaagatcctaaaactccccttggtctggcccaaaccctgaagagaaaaatcgtgattgtgttattttataaagtcttttctttaaaaatctcaagtgacattcttgtatcagtttccaaaagcaatgcaagaaagcaacctgtagccagatttgaataacattgtaactttgtcagcccatagatgaacttttcacaaaactggtaaaataaaattaaaaatatggtaaaattttttaaaaaatctgataaagttacacttattaccatttgaagaaaaagactaaatgaagcaaacctgtcatttctgtgttgcagggaaattgactcagattgtatttggccattgggatgtggtcacttgcttggccaggtccgagtcatacattggtggggactgctacatcgtgtccggatctcgagatgccaccctgctgctctggtactggagtgggcggcaccatatcataggagacaaccctaacagcagtgagtgtttgtatcaaatttgtcctatcaaactatagtttatttaaatatattttgcctttttgattttcctaatagttttttcctgaggtgtaaggattttaaaatatgaaagcttaagtggccaaaatctgtactggaacgtagctatgttcaaagtgttaaaatgatcagtactatcacctacaacatggagagacttccagatcccctcaccagtcccctacccagaccctctgctcagcagcccagtcaccaaatgtccccatccttcagaaattttcttcagcttcaccttatccattaaacctcatattatttctttcagctgaaaataatctctccctgctctgaatttttagaagattttgcctgtgtctcattcagggcactaactgctatctaccatatatactgtagtaaatttctccatttattcgtttagcaaacagtgagtgagtacccccttcacatgaggcattgtgggagatgcaaaaactgaataagacagtttccttgcttgggaggattcctcaagtgatagttattccacagtgcaccctaagatatcccataggaagaaagcgttgggagaggctggactccttcgtgaaataattttggagtacagtgtttatactcaaactttctacataagctctgaaagtcttacacaaataaatttgttgatgcttgtttaatccgcagcctctcaaacttctttttccaatgaaacttttatttatgtaagagaagttagttattagttgttggactgctgccccaagaaaacactaaagtagataatgagtgtctgtctttccatcttcagttcctgtcatagtaatatacataataggtttccaataaattaaatgactgaagagctggataagagattggctagaaataattactgcttttaattactaagctttcaatagttcactcaaatgcatgactttcctgtataatatagaaaggtttctgtgaagtgataatggcaagtactcaaaccaggattattcaaattgtcacagcttacacagcactccaaaataaactgaaacatgaatttggggaatacttataacccaacagagataaaaatttttcaggaaacctgtgcatctacaactaaaatactataagagtagataagaaatctacaagatgccatgttacattgcgtggctggctgctgcctctctggttagttccaacctgtgagacagctaggggtggaaactgaattgcacatccacccttcatgtcccactccatccccccaacccttatgcattttgacaggaataccgcaaaaataggaaatggctttggatggataagaacaaaggccccatcatagtacaggagagaatggagaaatacatttgtatgagaagatagtggaagattggattagatgtccaaatgttatgtgaagttttattcctgttgcccatagctagagttgaacagtggatgaagaaactaggtgtgttgtaaaatagcatatgcctcttggcatagctactgaacaagagagtgtctattgtacatacgagtctctgttctaaatttgaacaagatgtgatctttatttgagggaaaagatattcaatgttgcttgatttccaaccagttcaaataattagttaccaattctgttattaacaaacattatgctctaaataccagtaagataatctccctatttactcttttgtaaagccatgtccgtaaacaattcatttttaacagaattctagtatgcctatgtatgcgtatgtgtacatgtgtataagacatatgacctaccagcgatggctttattattctcaagaatggtacattatcaagtatattttatctaaatatatgttcacatatttccaaattgtctttatttccataatagtgtagcatttctttaaaaagtttaattaagcagcaggtctgtgtagtatctttcatatacattgataaaaattagaacttgttagaaaaaatttaaaagaaacagaatagagctttaaatctaattaattaccgtcttcaaaatgaagcccagaaatgatgcaagtgttatttccaaaaaggggatttatttcttaaaagctgccatctggtagctgagataagatgttttatataatatactgctaggaggtaaagaatattaaagaaaaatattaaattatagtaattatctatgttcactactgtgttttctaatgatctcttaaaccaaaagatggctaactatcaattgtagctttggtacatcagttagcaagaaaagttaaatacaataatatttaaattatttaaagctccttacaacaggagctgtgtaaatacaaaatgcttttttaattcttaagaacaaaaatatggatattatatttgttaaaaagcagtgtcatattttagttttaagtaaggacaagattatcttaaagatattatgacaaaattatcaatatgtatttttcagtattacctccatctataggaatttatttttagtgaaaagctgttgtcatcattatgaacctaaaccacttccatagaatccatcctgtcaagactttattagatatttaatgtgaacatacgtagtatggtacattaataaaagggaaaagtgctcttctagaataaacaagataagcacctaaagtattagtcaagcaacagtatgtgttgggtgcctactgtgtgcctactgtgagcctggtactatcccagcagctgggaatgctgcaaagtcacaacctctgactttctagagtttacaagaatctacttttatactgatcacaaactgtttctcctgcttggatatactgaggatgtcaagtatttgttaaatgaatcatgaattgttatccgataatattttgtaccatactttaaggattcgtaaaatgcttaactttacatcaaattgatgattatgaaaaaaactggttttagcttttttccataaggatgatcacagtagtaaaaaagtgatctcaggtttagtattgattgactgactgatttgtgacccacttatctatttaaaaagctaacctagtagcatatatatgcctgactagggcaaccatctgtgtcggtctcttcactcttttttcaggcagtcacagcacacactgaattgactgccatatcagtgccctgcctgtggtttgacatagacatagttgttgccatcagaaaactcacaatgtgaaagagattttcttctgttccagtttaatctactctagcttccaattcacaggtcagagaagcaggccatatgtgttttctatctcataatacattgatactcaagaccagaaagctagttatgtctaaatttgtattaaagtgtgtgacacaatgcccttaggttttggaggttgtatgtattaacctatccttgacgtgggaagtcctggcatgtaacataatatcctagtagctgttataatgaagggattggccttggtgtggacatggaactgctttgtgtgtcaccgaggccaaatcacacctgttcatcacaacatcatgaaatgataggatttatcatttaacctttacatgcatatcactaaaatcttctcaagataaaattcaactgactttaacatatttgtttctcttgcattgtcattattatattgtaatagatagctctattaattccacgaagaaaaaatgtcatgtttgtgaaatctttttggcaggtatagaaagtatgtatggttttattgtgtcaaatatattgtgaagaatgcagacatctcagaaatattagtctttttctaatcattttgaccattgtgatgaattggtcacaaagataatgaatatttgtaagcagactatcagatatagagtctcagaccataaaagagataagcaaagtctacctagtgcaggttagagttgaattatcattgctttattaatgtattttataatattattcattgttattctttcaaactcgcggctttgaacgtataaattatcttggagactttaaataggtccctaactagataacagaattgcaaagatgtgaaggacagatgctttcatccgaaacagacttttacacaaattctgaaactaatttggaagtgataaaaattaatttgcgcactttaattggaagcagcctactgcatgaaagagagcagagcagagcaggcaatttgtgctaaaagctgattgaattttttgtcaggtaggtatcttggacttggccgcttatcctcttgagcctctctttgcaatatattacaacccatctctgactggtgttctttaaaaggatcaatggtattcctttggaatccctagagtccaaaatttcattgatcttaggacttgacatttctcattacgtgctgtagcttccaacaagatagtcacaatagaggcaagttaacattgttgtctcttcaacagacactcaaaatacattgggacttcagctcaaaagccaatctgcttttaaagaatgtagttttaatgtttataccacatacaaggtgctttatagagagtttgatatacatacatacaaaaatttttaaatcatagccatgtgaaactttgaaagaggatttaccgttcatcttttcaactcaaatctacaaatattcattgggtagtttgtataacacattgttattatgcttttctattccactttttaaaaataagtattttagctcgtgtacgggcattatgcagactgtcaaaggagaagccaattgcaaaggagactccagctgtgcacacacaccttctctgggctcccattgtgtatgcctcagctctggacgctgaccctcctgccagccacaacctgtcaccaaacatctgccaaatcacatccctctctttgttggcatccaggcttcttttaaaaagactatcctggtgcccagctccacaactgccactaaccagtgctattataagaaatgaaagcatggccgatggatagcccagagagatttgtagagtatatttagatttagatacattaaacaagtttgtatcacttctcggagcaaagaatcttagctaggatttagcatatgttaaaccatctttgtaagatcagaggaagtgtagctccatatgcaatagttctcaccttgcagggctttttgaggaccaaatggtaatggatgtattggaacatcgatggcacagagtccattctgcagtagaccactcatccaccccatcccctcattctaacaccagtagactttccagggttccagactgagaagggagctgcttgctactcggcctcggcttttcctttccttttatgggactaaggcttcaagaaaggtctttggcctagattggaagcaatatatacagagtgactaatgtgttctgatcagagagcttcaggttccaaccagggggtgtctgggctttacgcagagcccagcttcctgaggaaggggaggtggatgatactattagttgtttttaggtgagcgtaggacagtaatgtactgtgacctagatctgggctcaggacttcaagagaagaggttgtcctgcagtggcagtgctcagaggaaaatgtagtcattgttatctctgaagaggaaaaagaagttagaatgaatgaataaataatttcaccgtatctgtcttccattcttcactgaatactctatgagtacataaggaaatgaaaccacatcatgggtgaatttgacattttccaacccacagaatgtttttacttgcattatcttgggaccttgggaaatgcgggtccaagtgtatttgatacttggaacagacctccacagcacctgcctgtggctgaggagttggggtcttgataagggactcctgaccgataccgctcttctcagctattccagcaaatttctaacataatatgttgaaataaatcttgaaatcatagtagtaatgaaactaccataccctttgactaaatcccttattctgggattttaactttcaaaactccatcatattttatctaagtataaacatgaataaaaatatcttctgccatgattctgcagtgacttccccagggtcagaaataaaatctgaatcagattttatcaggaggttcatcctctcactgtgcagcggaggtcttagaaactccactggctttgtttagttctaaatcagaaagaccacagcttcccctgcatatcagtgtcccacaaatgaggtttaaaataagaaccatgagttctttactttggccatttctctaaaagccagagaccatctcactaaaaaacctctcctgtctatgtgaataagcagcatctaatactagtatatttttttatcatccattttgagaatattgaaatgacctttgataaaaggaggatggaatttgtttattttaagccttttaatattcggagtttccaaatgcatgtctataaggaatctaaaaattggacgtgtttgttcttcatcagttctagtcattccagcacacggtgagtgcttctgtggaggcagtggtgggcctgagggcaacggcggtggccctcagaggggcggtccacctgcacctccctctgcactgggccctttaaccctgggctacatccatcaactgtgatgtgacagtgacagaatattcctaggattttgaatgattgttggggtgtgtgacatctgtccctagcaacgaaatgaaatataggaaacaagctttcccgccgctgcaggtttcccaactcagaaagcctggaatggcattttatttgcctttcacttaaagaaggaaacagtgctttcaggggccctaaaaaataccccctaatagttaagttccacagtttattcagatgatctggggaaatcgtaatgaaaaaaataaaatattttaaactctctaaatcagacatgagcctttgaaaaactcatttcctagcagaaaatgtataacatgcataaggaatatttttatacattttttttctcaattccctgcaataggatcagattgctttttattttttctatagcatattagggaaaggtcccaaaactattcattttatataaatgaattaagtgtataatttcagggttttccagtgtgctagtctctccaagataaaattatcatttagaaaaattaaacctgatattacacataaaatcttacaaatacttttttagagatttaatttttatggatacataatagttgtacatattgatgggatatgttatacaaggatacaatgtgtaatgatcaaattggggtaattaggatatccaacacctcagacattcatcacttctttgcattaggaacattctaaatcttctcttctagttattttgaaatgtacaataaattattagccgtagtcaccctattttgctaccaaacactagattttattccttctgcctaactttatctatctaactgtattgttctacccattaaccaacaccttcccaccacccttgccagcctctggtaaccactattctgtttatttcctctgtgagatcaatttcttcagctcccacatatgagtaagaagatgggacagttgtctttctgtgcctggctaatttcacttaacctcatgtccttcagttccatctatgttgttgcaaatgacaggatttctttttttttatagcagaataatattcaattatgtaaatatatctcattttctttatcttttcattatttgttggacacttaggttgattctatatctgagctattgtgaatagtgctgcagtcaacacaggggtgcagatatctctgatttgctgatttcctttgtttggaaaactcttatcaatgcttaaagcttattttaccaggaagcccagggcatctttgaaacaatttttttttctttttcacctttttcctgcagtgtgaaacataattttataaattatataaatatgtttcagacaaatccaggactgctgacattataaatggacactctaccaatagtcaaaacacattatagcaatatccatgtattcagaagaagatggcaaactagcatgagctgctgtcccccttctcccacactccatctaagagatgcctcaaaaacaaaattggagctgatgggtctgagaaaatgcaaataaaacggagaaatccttggggagacagaagataggcaggtcttaagagaagataggcaggtcttaaggaaggggctcttggccgaccagagtggaagatgtgggtcgtcttactgggtaaggccttgtgattatgcactttcctcatgaactctctgtggcttccctcttgccactgtgggcagagaactggagcagcagtccagctagccagcacccagaggtcccataagtgccaaagaaggggctattcagggggaggtgcatctgccagccctggaacatttaacttcccccaaccccagtgagggccagtagttcaacctaggaggcagctctaggaaagaggggcaccaagaccaaagtacagagtggttctctgagagacaagataggggatcgggggtggttaccccaccaaaaataggaattcacaaaggaaaacaggcaagcatgcaaagaacacaagtgctagaaaagaaagaccgcaaacagaacaacctatatgggtgatgcagaataagctcatttctttctgataaaagaagagaaaaatatagaactttttacaaaaggcataacattctctaagtccttcaatttatgaaagcagttagcagtgaaaatgcttctgggatataattcagctggactttttagctaggttcgcactaataaagtgaagtaggttcaattccaacccttagctgtatgaacttgggcaagttgaatcaccttgcaaagccttgggtgtctaggctatagactagggatagtaagagttcctacctcatagagcatgaccataaatacatgatgtaacacagataaatgccttagcaggcattgtacctgtttcataacaataatggaagaaaaagaatagccattaccactctcgttacgttctaagcatgttacatacgttaacttgtcctgtcatctaaacagcatgtataatagattcgctagttatgcgcatttcacaaaagaggagagcagagaggttaagtaactggctcatggtcacacagcttaataataatgcccttaataaacatgggtattttttgaatattgcattgctggtgtagctctctccccctgctattggtctgtagtgcctcactgctgctgttttcttgcaggtgactatccggcaccaagagccgtcctcacaggccatgaccatgaagttgtctgtgtttctgtctgtgcagaacttgggcttgttatcagtggtgctaaaggtcagaagtcatttctttcattttcaatgtctagaagatgactgttttctcacactaagcgtgattgtcagtttatttcttccaggaagcttcccatagacaaatggtatcccaaagttatttgtagatgtttagttttatgattaatatttactggcactaatataaaatatgtataaaattttatgtagtattttgtggtcaacagtgttctaagcagaacactgataaattacagtgtattcttatgatgcagccattgtaaaggacatgtaaaagacaaggggaaagtatccctgatgtagtgggggaggtggggggtcatgtcactcatcagacacggcctaggatcccctccctcttcaagtccctttctttataaggccaggggctgtgtagaggttggtggaaaggaaacaaagattacttggttctttggaggttttgttttgtttttgaggcataccttcactcttgtcacgcaggctggggtgcaatggtgcaatccaggctccctgcaacttccgcctcctgggttcaggtgattctcctgcctcaccctccctagtagctgggattacaggcgcccgcaaccaagcctggctaattttttgtattttcagtagagatggggtttcaccatgttggccaggctggtctttaactcctgacctcaggtgatccacccacctcagcctcccaaattgctgggattacaggcgtgagccaccacacccagcctctttggagtttttgtagaagatctttcatttcaggaagtcaggaaacttaggtcctagttctggctcaaatagcagttctctgtgggaagactcccaggcagaaaggagcctgatgcttggagaaactgaaaggagccctgggtgctgctggagtatcaccgtggtgccacaacctggaggaatgagaaggctgaagggatgggaggggcctggggcacaagcatttgcaatttttttttaaatgagtatagtaggaaactattgaagttttttaatcgaggtgatgagatagataggtttggttgttagagctcatttcagcctttctacggagaatggatagagtctgaaggctggcaccatgtttttaaaattttggtatctaagaataaataacccagaaatggacacataggatattttcagtcttttaattttaaaaagtaataatatgtgtaatatcattttaccctgtgaagttaaaaaaaaaaaaaaaaaggaaaataagtgacacatagtaggcgccaagaaagagacatttcctgcaggggctgtgtgatattagagatgattgctggtgttttcctaattttctatagggcaagtctattactttagtaatcaggacaaaatttaatcatgtcacttgctttgtaaaatatgtgtctattcagctcaattaaaaataaacacgtaattcatacattgttttgtggaaatctttttgggacaagggaatagatatataacaccaaactatagtgaccaatttttatgaattgatcagtgaattttttactttatcaacactattttataagggcaaaaaaacccagaaaccatcagagccaaatgtcactccttaccctcctttcacactcttgcctcactattcatttatttgaaagacaaaatatctttctgtaggctgaaatacttaagttttctcaattttgcttttacattttatgcgtatggatgacagaaaaaggtaaaatgtacttgacggcagtgtattgatgtggtacaacgcgtaaaattttgatgctacttgagaaaatgagcagctgttctgataattctattaaactttcaagaaaagtttctaaaagcgtattaagagaaaatgtctggcacataaagtcttttattgtcacgtaatctgtgagctgtaccattttactatgaatattacctgacaaaggaaaagaccaagtatctacctggtgaagaagcgtgcggcgtaggagtgtgatatgtagcaggtactctggctttgctctgtttaaatgtagcatcagcgcttggcctggccagcctacctctttcctgtcctcttccgtcacatctgagcgcacacccagcaaggttttcaggttggtgggagctagtatgtcgtttgtcgtccccaactgaccctggcattgatgtccccactttgcagagggcccttgccttgtccacaccatcactggagatttgctgagagcccttgaaggaccagaaaactgcttattcccacgcttgatatctgtctccagcgaaggccactgtatcatatactatgaacgagggcgattcagtaatttcagcattaatgggaaacttttggctcaaatggagatcaatgattcaacacgggtaaatctgcatagttcgtgctaagtaggactgaagccaagagattaaagattgattgttttacattaaataattcataatagaatgtctgtgctatccagataaatgtgttctagattaaaagtatataacttcttgcggactggtactttaaagaaacccaaagttcatttaattgcaagtaattaactcactgcattagacttcagaaatgatagctgttgtttgattaaagcttagaacctcgggagggtttttaaagctccttttataattgtttcagtgctgcaccctcacaacattaaaagtgagtttattttcaaagatttctatctctagaaccctaaacaaaaattacatatacccatttgcccttcattcatgaataaattataattgctgggttgtcattattaaacactgttttgaaatatgtttcttccatttgttctttaattctctataatattaatattcaagatttaactaaacatgttacttaatgctcaaattcttcctggattaaattgataatattctcttgggaatttaatcttggttttaataagatcttttgtatatgtaagaacttcgatgaattccacaatggaaattctgtggattgaacttgattttgttggacaaatgactgacagtaggcaataatgataagggaactgtactgagtacttttcagtagtgacagttggctatttaggaaaaattgagagaaatggttgttgtgtattttattttattttgtttttttttgtttgtttgttttaccttttctgaaggccattctcctgagcagtgacggccagaacctggtcaccggaggggacaatggggtagtagaggtctggcaggcctgtgacttcaagcaactgtacatttaccctggatgtgatgctggcattagagcaatggacttgtcccatgaccagaggtgagctgcgtcaaggacaagtatcatcactgagaactgtcattgaaggctctcttcattctaccaagggtgaattgtgctgtgagtgcaattccagcatccaaatgaaagaaagactggcaaagaaaaggggaaaatgaggggaagagtaaggattctagtgagagggaaacagaggaagagaataagaaggaaaaaaagaaaaggatctgatgaagaacaggtgcctgcagacatgttttaagggcccaagacatagaacttactcccaccaagttccctgttctcaggttcctgcctagtctcagacaggccaccctggcttatatgatgtgagggaaacacgtatttttcagcagaggtgggattcagtgtgagacctacttcttgctaaccagtttccagcaaagtgcatagtgtgggccgtagctggcccccctttcaacagcatgcggcactcacgcattacccagaacaatttttttacccccatgttcttatttacctgtttctcatttatgttattttgttttattgtatgtatttccttaaaacacgttaatcctttaatccagctctttcttggaaagagttgatatggatgttaatcaattaataatgattttccattgttcctcaatttgcaataggattttattatttcctgaaatttacctttgggtttcttacaaagtgaaaataatattagaaatataaagtctaaagttcctaagcctttaaaataaactacaaccctgtaatctgaatatggcatgtgatttctaatttttgctatttaacagaaataagaaaagcttgttaatcaacgtttttcccaactacatgtaatattcctcataacagtattggttttaaaatattttaaatattaagacataataaagttaacaaagcatcttcacaatataataaaatggcactgaagtcatcaggaaaaacgctgtaagctaatttagtctgggaaaggatgtttggtctgcagcccagactgtttttaaagaaggtttaaggttattattggagtatcccaaagtgctgcagcccatacttaggaataaatgggaatggtttgttgtgttactatttgtatatatgtgtgtttccagagtgtttgaaatgatttgtgtttgtaagcagtttcaatatttccctgatattcttactcgttcgtgtattcattttgctgccatcatcataggttgagtgcagtgcaaagtactaaggatccacaacaagaaactgaccccagagagctcagatcctcataatcattgcatatgagggcaccaggaacagactaacagaagaaggaagggatgaactcttcttgagggctgggaagggcaggaaagaccttagaagaggctcatccattcaccaggcatgaacagacagggtggatggaagagcatattcaaagttgcagtagtattagggggtctcaatggaggggggaaagatactaagtttctatttctattttaacctcatccttggttttgattattttgttgttttataatgaatagtgcatgcatatcaattataaactgataaacatatattggggatattactcaaaaggtatttattggatgaggtgtctaatcaaaagtgaagcaacactttatgtagacagaaatcctgaaacctgagttcagtcagtggcagtgggactggggaggaatatccctgaaaaagaagcctcagagctgaacagctgatcagttaggagggagagggagaggagacaaggtgacttaaccagcaaaagaccagcaaggtcagaaggtaccagtgattcatggtggacatgttgaatctgagggttttgtgacacagcctggcagtgacctccacttggcaatgggaaatcagcatctggggcttcagaatgagacgtcgttgcctttacgtccagggagactgtggaccgagaggacaagaggtggagtgattcaagggggcaaagaaaagaaaggtcacagagataggaagagatgccagatatcctcagagaagccaatagatgcccaaaacaaggcagcggacaggcacgtgtgtgattgctgagagaaatggggcacccagcggaggctggaaatgtggttccgtgggcccctcacgctctgcagcagggctggctgtccaggtgtgtgcgggctaactgtgctcctctcagcagaaccaagaagaaatttcagtcctacttccatgaatacaaaattaagacttggcaaaccttgagatcgtgatattgtctagtgtaaaatgccaaactttgagatactgtctagtgtaaaatagcaaccacagaaatgattttatatcactcttaactgctgtttctgcttttccaggactctgatcactggcatggcttctggtagcattgtagcttttaatatagattttaatcggtggcattatgagcatcagaacagatactgaagataaaggaagaaccaaaagccaagttaaagctgagagcacaagtgctgcatggaaaggcaatatctctggtggaaaaaactcgtctacatcgacctccgtttgtacattccatcacacccagcaatagctgtacattgtagtcagcaaccattttactttgtgtgttttttcacgactgaacaccagctgctatcaagcaagcttatatcatgtaaattatatgaattaggagatgttttggtaattatttcatatattgttgtttattgagaaaaggttgtaggatgtgtcacaagagacttttgacaattctgaggaaccttgtgtccagttgttacaaagtttaagctttgaacctaacctgcatcccatttccagcctcttttcaagctgagaaaaaaaaaaaaaaacacgtttgatactttgtacatcagatgcatcttatttaaaagggatacttttgtaaaagtaaaaccttgtataaagaacaaaatgtttcttaattttattgtggagttacaacttgcatgttccttactcctgttggcttgatggaacaggtgcattcacactatgaaacagaaagatctgtccaaggacacagcttgtatgaaagggttgaatttgggctccatcagtaatttttgacattttcaccaaaatatagtttgcactttttaatctaaagtcatcccttctgagtgaaatttgctcataaagcatttggatactaagccattatttgccattttgggtactttatacaaagaaaattcagccctaccctgcataatttgaagacacagcagaaagggggcttagggatgaggtcctggtttttcttgtataaataggagtcatgggcgttagttctgtagtaataacttcccagcacctggacatctcttccagagttatcccactggcttggtgtgtatacattaggggaggataatctgatgctaactttttttttctctttggttcttgaatagcttagtttctttaataacaagtcaaactttattacaacaataactgaagttattcttttaggttctcgtgaaattctcactgaaagccacattcttagcctaaggcatttcatcttttatgatataaaatgatggctatcaaatgattttccatacattgtactgatcaagttatacacccaggggtatatacactttcttcatgtttcttctttgtatatttggtgactgtatcgtcatagatgtacatattgtgtcggtagggctatgaggcatgttacaggaatgtaattttctcagaatttacactcactcgcagtcatttatttaaaaagataaaacaagataatgggttctttgtattggcactttgcaccagaaacatatcattatttattgatgtgattacttatttgttatccaccttgtactagtaagttttagcactgaattccttcttcactgttgtttgtatttatgaaattctgaaattatggggaatcagcgtaatgattaagttattcatcaccaggctgtaagcaatatcttgagtttgtagcttagaattgggaggatacttaacatctggaagacaagttcatttcatcttgagatcatggtgaaatattttggatatataaattccttaagctattgtaaccatgttttattgcaaagatgtaaaatatgccagatgtgtgtgagttggaaatcaaaaaaagaaaaataaaatatgcaaagaattcaccgactgtttcagatttcattggacatgtcactagcatgctttcattgtgttgtcatacaggtttccgaagtcatcatcatctgatgtagagcctacagcatctaaaaacatgaaatcgagtcctaatgaggttctgcaatttgctgaaacctgagctgctctgccgagccatctggcagggatctggggcaacagcgaccatggggaaacggccctcattgtctattctgcataatccactttggggattgtctttattttatttaaaaggaactaagtagtgaaggttataataactccttttttgagtgttatcacataatgcctttttcatttgaaaccacaccttctagaacccatcagtgaccaggcatggcacaggcagggaccgaggacctggagaggctgagcagctgctagcaagggcagccacgagtgggctgagggggattcggtcacacagattggcatgggtggtagcaagggcagccacgagtgggctgagggggattcggtcacacagattggcatgggtggttggggcagcggcccagacaggcccagagaatgacagaactgcaggccgtgcttccatccgcattcccgagactaaagggacagacccaacagtagcctaaggaaggtttgcgctcttactttccatcctatccccaaaccagaaatctgtcagtcatctgccctgctggctccctcacccagccctcctgccaggcactccagccaactgactgatcactacctaaagtgtcttttgaaactgcccctgccctttccagcactgtcatctggactgtccgaaaacctcctgacctctgacctgtcccctcccatccatgctccgccctgctgcgaaggcacccatccagtcatctccctccctgccgccccgcgcccccctagtgccccccagcgccccccagaaccccccagcactttgaaaaaccaataccaatggcttaaaatggtattcttaaactctggtgggttgaaaatcacctggggagcttatttttaaaagcaggatctagagtcccaccgctcccccctcccaccccaagcacttcttgggcacattttcaacaacactgattggagggataaattctaagctcagtgaagcgaagtccttcaggaaccacccccagcagccagcacccctagtaaaccagcctttttccaagttcctgagaactctcttgcacctgagtccctaaggctcctcctgccaggcggcccctctctgcctgcaccactcgcctactgccttgtcgcagattgacctaaaccaatttggtcatgcacagtcttttttggcaggtaaaggtagcccccaaaacaccacatcttcactatttcatgatgaaaacaacttttagaaacagtttctgctatgtgtggggatacctttttttttttttttaattgagacagagtatcactctgttgcccaggctggagagcagtggcggaataatctcg

SEQ ID NO: 391 - DNA, 246053 bp, Homo sapiens
  source 1..246053: mol_type = genomic DNA
tacaattaggaagtgatggccattctggactccacgggtgtgaatactagacaccttcactatgggtgtgaatacccaacaccctcaccctgtgtatatgtgattctcttgccatgagtgtgaacacctaacatcctcaccatgagtgtgaacacctgacacatgggtgttaatacccaacaccctcaccctgtgtatatgtgacactcttgccatgagtgtgaacacctaacatcctcacgagtgtgaatacctgacacatgggtgtgaatacccaacaccctcaccctgtgtatatgtgatactcttgccatgagtgtgaacacctaacatcctcaccatgagtgtgaacacctgacacatgggtgtgaatacccaacaccctcaccctgtgtatatgtgatactcttgccatgagtgtgaacacctaacatcctcaccatgagtgtgaacacctgacacatgggtgtgaatacccaacaccctcaccctgtgtatatgtgatactcttgccatgagtgtgaacccctaacatcctcaccatgagtgtgaacacctgacacatgggtgtgaatacccaacaccctcaccctgtgtatatgatactcttgccatgagtgtgaacccctaacatcctcaccatgagtgtgaacacctgacacatgggtgtgaatacccaacaccctcaccctgtgtatatttgatactcttgccatgagtgtgaacacctaacatcctcaccatgagtgtgaatacctgacaccctctcaatatgtgtgaacatctgacaccttcaccatgggtgtgacttgacaccctcgccatggtgtgaatacctgacacatgggtgtgaacatctgacaccctctcaccatggtgtgaccacttgacaccctcaccacggtgtgaacacctgacacatgggaatgaatacctggcaccctctcaccatgtgtgaacatctgacaccctcactatggtgtgaatacctgacaccatgagtgtgaacatgacaccctcaccatggtgtgaacacctgacaccatgtgtgaacatctgacaccctcgccatggtgtgaatacctaacaccatgagtatgaacatctgacactcttaccatgggtgtgactacttgacaccctcagcatggtgtgaatacctgatacatgggtgtgaatacctgacaccctctcaccatgagtgtgaacatgacaccctgaccatcatgtgaatacctgacacatgggtgtgaacccatgtgaacatctgacacactcttaccatgggtgtgaacacttgagaccttcaccacagatgtgactatttgatgtcctcatggtgatgtccttaccaagggtataaatattcaacttgcaaaaggatccactccctggtgactcaggcggatgtggccttggccctccaggggtatactcccactgtcccctaaacgcctgccctattggctgcccagtctgaggtagagaagaaacctttgtaactggagtataattcgctttttaattagaacgacgtgtgtaaatgacagaataccaccaccctgcgcagatggcggccacagaatacgcatcgaattcattctgcccaaggaagggagggagggaggacacagcggggcgtgagccagcagtccccgcccccttggtcctgcgagtgatggggtcaccgactgtcggcctgcacacgcctcttgaacggtaagcagagatcaaaagcacagcagcagtaatactgggtaagtccttccttgcgtaaaacatctgaattaattcattgaaggtatcaaaaatataccctgtaaaccaacacatcatttacatctgcctttccttcccaccgctgcggcaacgatgtgtgaaaaaaacagtccagtcctcggagcatccgttccccccaggccgcacctggcccttttgtccgcccacctggcctgacttggtttccagcaatctcgttggctggggcagtctgtggggaccggaacgagcgcactgggggctggacagggcctgcgtccatctgtccagagcgctaagcgggatgggaggcggagggagggcgcgggggctgcgagctcagtttagactttggttccaaatgcattcgggggaggcagtggcgtggaggtgcgtggtcatcctgctttgggtccctggccgccctggccgcctgcgtgtggctgccacacgcctgccgtgccccctccccggccccttcccctcccttcccgagcaccaggtaaacatcccctgagtaaggtctgcacagggccagcccggggcgggagtcttagttaaggctttagacaggcaaggatgccggctctggacggacagatggatggaggcgcaggcggactcaggggctccttccttggttgggggagtcggcagccgccctgctcctgcagggccgttcctgtggctcgctgggacctgacaccgcccccccccccgccctgttctgagtcactcgctgtcggagagtgtctcgtactgcgagcagagcagtggcttgggctcctcgtcccaggcgtggtgggggccagcgaggggcccgctgcccgcggggaggcccggtgggggtggggaagccatgacacccgcctgcagccgcatgatcagggggttgtaggggaatggcgtggaacctgcgggaagaagcgaaagatgcccaggaggcctctgtgagcccggcagcccctgctggccgcctgcccaccacaccgggaacagaggcctcagcgtttctgtccaacagtcctcccagacctttctaattgcgaacaggtctcagaaccgtctgcctctcttcacctgttctacttccgtccctgttcacaccctgccgctgtcttttgcctggactatagcagtagcctattcaccgtccctctggtctattctcccaggggccttctgaccctatgttagatgagcatttcccttccgaaagccctccacgcctcctcactacccatcaaaggaagtccaggctcccctggatggtccaccaggcccatgtgatctggccggccccaaccacacccttttcctctgcctgtgcccctggcagaagcatcctgatggttcgtgagccaggctcagctgcccaggcccctggacagcgtttccacagaacaggcccgagtctgagctctgcatgcagcaggcgctcagcattcagtgccccggcagcattcacagcccagtgttgggggctcagcgagcccagccctgtccccacctggtgcccacctgcggacgagggcctgtcctcccacacgcggttggtgagcggcgtccggcggttgcagtctccctccgagtgcactgaggagacagagggtggccggtccccagatgccaggcccggggccggggacttggcttttcggctgctgggtctgccagagaccttggccttcccgccgccacctgcagggggacaagatgggaaggggctgcgttgggcagtgaagacagcaccgacgctacggtggggccacaggggcagggtgaggtcctgccatgggccctccaaagagggagggagagcagtaacgtgaacccctcctccctgctgcccgccccagctgggaagccagggttgaccagatggccagccatgagcctggagggtggagatagtttctgctgggcagggggaggtggctaaactgtctgctgtttgcaatagccccctgggctgtcctgcagcgaccccagccccaggggctggaaccctaagcatgaagctgggcttccagtttgagcgtggccccaggaccatgctaaggctaggcaggatccaggccccgtgcagagaagtcaggacccctgaggccaggcctgacccccacagaggctccagaagcttcttggggcctcagtgtccaggttggacaactgcaactctctcctcagctccctgccccgatacagagggtattgatggggaaccaggctgacccctaaggctccctgactcccagggctgagacagaccctgggctcctccccaccaggctaaggggcagctgaggacacatagtgggcctggcagatgctgagcacaggcctggctgccattcccctgtccacacagtgtgggtggggcttcactccagcctgctctcccccaaggagacagatgggccaagaagccgggtccccgcagggaggaaggcgggaggactggggggcggacagcagtgtgagtgtccgagggaggcggcagcgcttcgggcctagtgggcaggagggccggggctggggggcagagggtacagacacttggggggtgtcagcccagcttcagattagcaaactccagaacgaggtcaaacacgcacaaaaataaagtcacaagctccaaagctcgaggagggggttgtcagaggagcgcggaggagcgaggattaatcacaccgggggtggggacagacgggggcggggcgggggtggcctgcagacctggcgaggtgagtgtgtggtcactccgtccgtcagcagcggttatgggcatagcagcgggcaggctggcactggcattcagagggttaaaagcattggcgctgagcggcggggactcttcccactggtcatatttacccatgagtgcctttctaattatggcctccagccccatgttggtgctggcatgttcctgcaccgcctggcttctataggtcataaggcctgggagagagagacagacagacagacagacacatgggggccggggagggggagccagaggggcgacagagagagagaagggagagagagagggaaggaggaggaggaggaggaggagagagaaatacacagtgagcacatttcggcaaagcaacatatttatttccctatccctccccaccctttttttcctgctgggtggtgataaaaggggagaggctggttccttctacctggggccccggaagctcttgggcactgccagggaggtggggtaggggaggtcagatgcccccaccagcccctattctcattcctattctgtcctctgggaaatcacaagccccgtctgcacctccaatcctagctggggctgttttgtttgttttttttttaaatctcaagtggccttaatggagagggtgggagatgggagggctaccctgtttggggaacaggctgctagaaaattggctcaagccagagctgggggctggctgggggctggggaagggactgagagagagaaggtgaccagatggtcctcccgctgccccacctccacctgtgtgatgggacgtgcagccccgtacctccccaccaagctgggcctgctctcctccctctgcctctccccacccaggagccatgaggagaaagaggtgcagagacggacgctgagggcggggtcatagccatgcagttacggtgcgtgcaggggacagggcagaagtagacacaatcacgggaccagccctggtccggccccagctggcccagctgcccagtcccaaggacaaagtggtcgaatcaacaaaccggtcccaagaggatgcttccagaacacctcctgacaatcggggaaacctccttttctgttaaccacatttcctttcccttttttctttcttgtgaaccacgtggaggtgggggcctttgcacaccccccagaggtgctgtcttttcagaacttttgttaaaccagcctttgctttcaaaagcccccagtgaagccccattccaccgtgcccaccacggggcaagtgtttcatggagttttaaacttctgctccgaatgaatcatacgaatacaaagtggtcaaatcgtctttccgaccactcgctcctttgtaaaccaaaccgaggcttccatgaggttgcgggtgatgcagatgctttgaaaatcacgtttctgtagcaactgctggctgcctgcgttttcttttcccttttggtttcaaatacgtttgtagccagggatgctcacaccttttctgctgtcttggccacatttctgcagcacttttgaaaaaacagccatgtgcatgaagaaaaagcaacatttccaacaagggtgagtgctgaaatcacagcagcgcgactgggccttctacccaaggccacgagtccgtgacctgatggagctggctccaggcttaacgatctccatttataaaggtgaagtctgacacaggttgagtggcaaagactggagcctggaaaatttcttcttgtggactaaaactgcataaaaagaaaaaatcaggctgggcgtgactgctcacgcctgtaatcccagcactttgggaggcccaatgtgggtggatcatctgacgtcaggagttcgagatcagcctggccaatatgatgaaaccccgtctctactaaaaatacaaaaattagccaggtgtagtggcgggtgtctgtaatcccgctacttgggaggctgaggtggaagaactgctgaaacccgggaggcagaggctgcagtgagccaagattgcaccactgcactccagcctgggcgacagagcaagactctgtcaaacaaacagacaaacaaacaaacacaaaaaacaaaaatcagtcgaggtgggaggatcctcagcttgaggacaggagttcaagactagcctgggtaacatattgagagcctgtctctacaaaaaagataaaaaattactcgggtgcagtggcgcatgcctgtagtcccagctgctcaggaggctgagaggtaggaggatcatctaagcctgggaggcggaggctgcagtgagctgtgattgcaccactgcactctggcctaggtgacagaaagaccgtgtcttaaaaagataaatacaaaatatttatatataagtgttagcataaatcttcactgtaccatgccatgagtttttacacacagatacacctgtgtgtctagcacctacttcaagatttagaacatcccaggaacattcatttctaaccctcttgttgtttcgaccaaattgtcttcttcccgttgcctgaggcttggcaatgcccccggtgtctagtcactgggcaggtggaggtgtcctagttgggactcccatttggaggcctcgctgaccccctgataatatctgaacgactatccttcgctcaccattcccagggctcaaggcccaggaatgttccccagggaagatcagcaaacctctccgacctccatcctggcctcagcttccaccaaaggaccagaggataaccaggcacccacacagaggcagccgaccccaaaactgcctcagccccactgggccaggcctgcccatgcagagtgacccccagaggccacaccccagactcaccaaggaaatacacaatggggccctcctagaggatggggctccaacctcaagggacccctaagtccaaaagatcatagaagtcttaagtttcagcttaaaagtgcgtgtcaattttacacctatctctgccacacacctgtatttgatcttgaaagaaaaagtaaggcttcccagttccctggctggatttaaggaatgaagctctagctataacaaacgcccgagtgaactcggaggcttgtgctctgagctcaggcccacccctcgtccagacatgtgcatctccagctgaggctggcgaagaagcaaggtgagtttccagctggtgagggtgcatctgatacttactaaccacccgaggggatcttaactccagagattccctgcacagcgaggatcctgtctacacagggaacaagcctcgcctgcctgttgtgtgactctgaatcctactgtgcggttagttcatcccagaatgagggggtacacccagactagcgaaggctcctcgtcccttcatgacagctggagcaggggtggggagggagcggaggggaccagggcagccatatagcaagggctggatgggttacctgttccggtgatggcgggcatattgaagatctccgtcccaggctggctgatatctggaagcgggtgacagagtgggtgaggcccccaggtctctgggaattacctgccctaccagtcccgtgtggtccaggccaggtgtgctggcatcacctggggaaacttgtgcattgcaggttctcatgcagcaggcctgggacagggccaagcgtctgcatttctttttttttttttttttgagatagagtctcgctctgttgcccaggctggagtgcagttgtgcaatctcggctccctgcaacctccgcctcccaggttcaagtgattctcctgcctcagcctcccgagtagctggggttacagacatccgccaccacgcctggctaatttttgtatttttagtagagacggggtttcaccatgttggtcaggctggtctcaaactcctgacctcatatgatccacccgccttgacctcccaaagtgctgggattacaggcgtaagccaccgcgcctggccaagggcctgcatttctaaccagtaccctggggatgctgatgctacggttccctggactgcacttacagggccctggagttaccagcctgggtcagagattttttttttttttaagacagtgtcttgctctgttgtccaggctggagtgcagtggtgtgatcatagctcactgcagccttgacctccgaggctcaagaaatcctcctatctcagcctccccagtagcttggactataggtgtgtgcctgtttttaaagttttttgtagagatggggtcttgctatgttgcacagactggtctcgaactcctggcttcaagcaatcctcctgcctcatcctcccaaagtgctgggcctataggcatgagccaccgtgcccggcaagccagtgactatctgcaaggtttctactccagccccaggaagggaaaagcatctgtgatttgtccaaacttccctggcagatgaggcttcttggggtcggggactgtgacagattctttatttgcccacccactcacgtattccctggtggatctgctaactgccaggcgctgtgctagggactgggaagcagagtggggcgttcatacccagcaaccacgtcaatgggtgcaaagccacacaggtgctgagtgtgggaggcgcccggcccttgtgtgggagggatccaacccctggtcccagtattcatgcaggtattcactgggcacctactatgtgctgggtgctattcttctgtgccagtaagctcctatggaaagcccagcaaatcaagaaactgccctggggctccccaaatgtgaggcaaagggcctggggggaggtggtcagcagggccacttagctttcgaaggtgcaccgtgggtttctgccactgggcggctccagctgcccaggcaggccacccgcccacctgtggccccatgcttccccgggagcctgcaggccccttactgtattcaggctcattccggttgtgggtgttcagcttcttgttgatctcttgcttcttggacttgaccatggcggagttgctctcggtcagcttgctgaagaaggctggcggctggctggtgttgcctggagacttggagcccatcctgctgtgaggatcaaacacctcacatcagctcacttggtgccgagcttgcatgcctttgatgatggggaactcaccacctgagatgccttagacatttggaagcaagcttcacccgcccccacgcctgcatcccctgcctggtagaagatcacggctcctgaaatctcctctgcggttcacccgtcctggggctaggggtgtcttgggagacgcctggctgcgtggtgggctgcctctgaccacttgctccagcctgaccctctcaagagagccccaaggactgaaattgggttccgatcatgcccttccccaggggcagcgggcccagcttccttctcaggtcccacctcacccatcgcccccggtctggcccagcacacctagctcattatttcttagaggttcaacaggggctgtcaacgggggcctggtccagctgagatcccagcccaaagcatggaaagctaccactgaggtctccccagggagggtgggcatgtatcacacccccaagttggtgaaacctgcttggcaggcttgaggtcacccagctgagccctgtgcccttgtcactctccacatggcaccacggtggactggggccaaggatgggcaagggataccagagcatcccgggggcagcgcatgtgcccacagaagtacctgggctccgtctgttccccatcccggtacagcagcgggtacacagcactccgggagtgccctggctccgtcatgccctccggtggggacacaggttcaataccgtcctcaccaccacccaagaccgacgtcttgtttggctctggagacctggatggagaaagggccccagatgtggtcagaggtctccctactgagggggcgcaccctccctccactctaaaccagggccccacacgcttttcctgtacgtggccaaatcataaacgttttaggcattttcgaccacaagtaatctctggcatgtatcgttatcatttttattttttttttaaacaaccctttaaaaatgtaaaatcatttttttagttcatgaattgtacaaacagagggcccgggctagatctggcccatgggccacagtttattgacccctgctctgaattctggttgtaccccagtgccagctacaccactgccccccaaagatgtcctgctgtcttgccatgtctgtcctcgcacacacattaccccccccgcccccaccaaaacgcctccttcaccctggagctcagggccctcccctctctttctcttttgacccccagaggccccacggttcaccagggtgggggtgggggcgggggtgggagtgggagtgtgcgtgagcatgtgcatgtgcctgtgtctacaggggtgtgcgggtgcgcctgtgtgcgggtgtgcatgtgtgtgtgcgcatgtgtgcgggtgtgcatgtgtgtgtgcgcgcgcatgtgtgcgggtgtgcatgtgtgtgcgcgcgcatgtgtgtgggtgtgcacgtgtgtgtgtgcgggtgcgcatgtgtgcgggtgtgcatgtgtgtgtgtgcgcatgtgtgtgggtgtgcatgtgtggaaaggctgctctctaatcatacagccctggaacaaatccccctctgtcacctactgactgtgcccctgtgggcaagtgaattcacttctccaggccttagtttcttcatctgtgaaatggggagaatgctgcctatgtctcctggggggctgtgtgtaaagggtacacgtgagtgcctggaacccactgagcacagcatgtactttcatcagctattattcgttatgtatccgctctgtgactcccccatctcctggagcctccatttcttgcctgtgcaatggcaccaggcgggcctcatatgcagctgagctcagacccagctctgaggcaggcagctgacgaaggcctcccgccggctgaccagcaagaggcacccccatccctcgctcacctcttgcccccttcgctgtggggggagccacgggccggggcaccatggtccgggggcgggaggtagaggtcactgggtgggcggcggaggtccaggacggggcagctggccccagggaaggagtagaggggggcgggcaggggtgcgctgagctgctgtgggtggtgccgggtgtagtcctgtgtgatgacctcctgcaggcaagtgggggggcccagagtcaggcagcactctcctgacagaaccttctgggggtggggaggggctagacggagctcggggcagaatcctgggtggggccagcttcctgggtgactgtggacctgcccgccaccctctgggcctccgtgtcccagtgtgcatgggagtggggctgtggtcagcggtcccaagctggtagttggcagatggctgatgagaccagcccatgacactgagaaacctgggccaccaggaaggcctcattgcccgtgaagatgccatcggctcgcatcacaggctcctcccatggattagggggcggtgatggtgccggtgctcggggctttgggatctcaccctcacccacgccctggatccccccagcgccatgccctggatcccccagccaccccgccaggacagaagggctgtggggttccccatcccctctccaggcctggtgcccccaggtgcaaaggtgacaagcagcagcagagaacgcgtagttacactgatgtgctgggccagggtgaccacccgctggtgacctttgacccctggggcggtctggagcagcgggctggacgagggctggctctcaggcagcggccgcaggtgtgggaggtgggcggcctccccgccaagcttcacggggcctgcaggcagagcagagctggtcagggggtgtctgctggccccagggctgctgggcccaaatcccagccccatgcctttgagcctcatgatccagccaattccttggcctttaggcacctctgttttcctatctgcatgatggggccttgagggtcctcactgtgcagggcttcgggggcctgggtactgggtggggcgtacctggctgcttgggccgcagctccccctccaggtggctcttgtcgagctcttccaggtgcttggggagccccttgtcgtgggtcagactgggtgagctcacagggctgacgggctccaccccttcggggctgtagctgctgccgtggtaacctagggcaggcggggggtgcagagtcaggcaccgggcccagggtttcggagcccgaggggcagggctgccctcccagctggctgggaccccgggggggtcaaggggaacccaagctaggggtagggtttgggctcccaaagacagtaaggcagagaggggtgttggggagagacagggaggccaagggagaggtggagagagatgcagagcccgggacagagacagacagagagggagacacagagagagattaggcaagaagggacagagatgggttcaggtggtggaggccgggcgaggccagcgtgagatgggggcagcatgggtctctggggaaggagtgtgtggggcggagtgagaagtgggggtgtggctgggagtgaccctgggtccccggggccccgcctgggctatagcctcggccatcccagtccaacagagaggagccatgaactagggccaaggcaggggtccagaggcagagggctcccctttttctggggtacaggggctggggacagggcaagatgcaagagccagacccagctcctcctcgacagcgcaggtccctgccccgcctcagcttctccttgcaccgcctgcctccacttcccccagtccgacagcatccaggcagccggcaggtgggggcgtaggcccgagccctcccgcagccccatccctgctccctggacacaggcgcaaagagggagatgggggcgcagtcgaagtcagaatcacagatccattcattaaagaaaaaaaagcaaaaatccaaaaaaaaaaaaccatggtaaaatgatgtgcaaatgatgagcgcccccaaaccagaggggcaggcgcggccggagtagtcgtcagcgcgtgcaaaccggcgaggacggatgggcttcaaaacaaaataccaaaaccaacaacaaaaaaaacgggggccaaagtaaaaagcagagatctgaaaatatctttggaccacgagacggggtgggtgcgggccggaagtcttaccatcgcgaggggagccgttggccagcgcacctccttctcgcgcccctttatcgtgagcaatttgacgcatgataatcgcgtctatgaaggtggccgctgtcagggtggtcttacccagagaacggagttccagttcctggatggaaaagggtttactttgagtcttttcccggtgcgggtccgaggccgaggcaggtggcgccggcgggtccgggctggcgtggtgaggtgcgaggttcttcgcaggggtgcgggcgatggtggcgtggccagagacaggaggcactaggggccggggctccgagcccttgctgggggaggaggcgggctccagcccggagcgggctgggggcttggcgaggaaggcatggccggtgtctgctcggggccgctctggccgggcgacccggggggcctccttgggcagcaagacgggctccatgagggtagggtagaccccatcgagggtgccgcccagtgggcagtgggtggcaggtgggaatgtggcagccgggcgaacgggtgaggaggtggaggtggacctgggggaggagagaaggcggtcaggcagtcatgggagctgccctcttcctccaccaccctcgatgagtccccattgccctgggataaatccacatcccctgctgctcccagagtgaaactgccctcctgactgtaacctgccagactctgtgcgtcatggtttgacccatcccactcattcgttcattcattccttgcatcattccaaaacttctgattaagcagctactaggtgccaggcactgttctagacactgtgaatacagcggtcataaaacggatgcaagcatcttaccatctaattcagaaaacagactacgatcacattaacagatatcccaagctctacagagcctggtaactgtgtggaggtagtcaatgaggtaccaggagagaacggcaaggaagctgaggcagggctaggaggtcttcagggagggggcacatgagggagctgggcctgctcaggatacccgaagagctaaaaaagccacgtgaggagtgagagagcaaggggaaggatgccagggggcggccagggtgggcgttgagaacagagaaagctgctgttcccagctctgtgagtgagaagctggggcacagctgcccctgcacagggctggggctggaacaggagccggctgctccacccacgtggccttcccggagccctgcgtttccatgggggcacccccatctctcgctaactctacctcccagagcctcattcatgagcgggcagtgggcaggcactcgttttctccattatatttttgaatcggctgtcacgggcatatcccacagagcctgtgtgcggaaccctgctccccacagccagggattagtgcttcatgcacctgctgggtctgagtcaggggtgacaaagtcgccactgcttttgggaaacgatgccatttttcataattgaaataatgattaggggaggtatgacttcaggcatccaagcggcaagttggggcacaagtacttttttgaatgaaaattcattttggaggagtaagttgcctctaaataggtcctggaggctgagtgcggtggcgcacgcctgtaatcccggcactttgggaggctgaggcaggcagatcacttgaggtcagaagtttgagaccagcctggccaacgtggtgaaaccgcatttctactaaaaatataaaaattagccgggtgtggttgcacgtgcctgtaactgcagctacttgggaggctgaggcaggagaatcacttgaacccaggaggtggaggttgcagtaagcagagatcgtaccactgcactccagcctgggcgacagagtacaactccatcaaaaaaaaaaaaaaaaaaaggttccgggcagggaagggtgttgaggtgtgaccccacccccctggtgaagcagctctgcccacagtctctggagtgtgtgtcaccagagggcactcaggggcctctcccatctcagagaaacttgggactttgtccaggcaagagggacacctcttttccttgctggccttgctaaatgtgggggaccgggaaagtctttcctcacagtccccattcagtctctccctctccacagattctattctcaaaccaaacaacctccccatctactcatcccaccgcccaactcatcgtccatccactggggcctccatccactcatccccacaattactcatccaaccatccattccatcatccacctaaccctaccacccacccatccacccacccacccagctaacccagccatctatactctcacccacccacctacctccctaaccctaccacccacccatccacccacccagctaagccagcgtctatactctcacccacccacctacctacctaactcagccacccacccatccatccatccacatggctaatctggccatctatccttcctcccacctacctacctacttaacccaaccacccacccacccatccatccatccacccagttaacccagccatctatcctcttacccacccatctacctacctaacccgatctacctaccacccacccacccacccacccagctaagccagtcatctatcctctcacccacccacctacctacctaacccaaccacctgcccatccatccatccatccatccatccatccatccatctggctaactcagtcatttatcctcttagccacctacctacctacctacctacctacctacctacctaccacccacccacccacacagctaacttggccatctatccttttgcccatctacttacctacctaacgtgaccacccacccatccatccacccagctaacccagctatctatcctctcacccacccacctacctacctaaccctatcacccacccatccatccatccacccacccagctaacctaaccatctatcctcccactgacccacctacccacctaacccaaccacctatctggctaacccggccatctatccttccacccacccacctacctaccaaacctgatcatccacccatccaaccagctaacccagccatctatctttccactgacccacccacccacctaacccgaccacccccccatccatccatccatccacccacgcagctaacctaacttcccactgacccacacacccacctaacccgaccacccacccatccactactcacacatagtctattcttctacccccacacatctgcccacccacccacctcccatatacctcccaccaagcatcctcttatctgctcatcctcctactgaccacccatccacctgcccgccccctcccccatgccaacctggcccacctcaggaccgtgggcgtgctgggctccacagcggtgatgatacccttcatgcctgtgttgtgaagcacactgggtctctgctggagggcatcctgggtccgaggggagatgggcgagtgctggtgggcatgggagtgggaggcggggcggctgctgctgcccccacccccgccgctgctgccgctgctctgctctgtacctggtgacagtcagtggcatcagcagggggaggcctcttgcggcccacaaggagtcccggagcggggggtgggggctctgatgccctaccaggtctccagatgggtgcgtgctccaccgtcgtggtggacgtgaggatggacttttcccgctcccgatcccggtcccgctctcgatcccggtctcgctcccgctcggacgaggacgtggtggttggttttgtcaagtgtgttggacctcctaggaaacccaaaggccagagactcagccccagggccgaagaagagcctggctttgtcttctggggtgggaaagagagcagggcttctgcccgcccatcccccagccgcctcccatggatgccggggtccccaccccagactgggcagtggcgctacctggggagagtggggagctgctgtggcggctgctgaagggctggggcgcggtggggaggtaggcaaggcggtccatggcggtggctggggtgcctggtgtcgggggcacgagcacaggcaggtgtggcacttgggacaggtcgatgatgcctgcgggaggtgttgggccagggctgtagccacagggaggagagaggccaggctgcccaccggccagatcaccctcctggagagcacggcacacactcctggagccagcagagctggtggcaggcactccctcctcggctcccagcaccagccatggaacccttttctgaatgctcaggttctctcggtaccacctcctcttctgctcccaagcccgagccggggcatctcctgcagctgccctcactggttcccatctcaggccctctgtgccccttcagcctctgacgcctacacaatccattccctgtattcaatcctcactgttcaaaatacttaagtgtgacttcagcttttccagctgagccccagctagaacttggttattccagaagcatttctgaggatggccctggaacgtgtgcacgcaaagcagctgtgggctgtttacaaggcaaaggaacaaactccaaacagcctcacattttcatctttttttttttttcgagacacagtcttgccctgttgcccaggctggagtgcaatggtaaaatctccactcactgtaacctccacctcctgggttcaagtgattctcttgcctcagcctagtgagtagctgggactacaggtgcgcatcaccatgcctggctaatttttgtatttttaggagagacgggtttcaccatgttggtcagactggtctcgaacttctgaccttgttatccacctgcctcgccctccccaagtgctgggattacaggcatgagccactgtgcccggccacattttgatctttaaactcctgaggcccctgtatcctaagagtatacacagatgcacgcacacccactgaggatgcagccaggagccacacgctgtgcactcacctaccagatgccaaccagcacccacagcacgcacaaccccaggccacccactcaggtccgttcacacaaggtgacccacaaggtgaccaggtctagctgcctccgcgaggccacaggggcacgcccatgtcctttgggaataaggccaaacccagcggaggtggtctgcccacccactcacctcggggacccgcagcgtagttgagtgccagcgaggactcgcggggcgagaggcccctcagcatatcagctcgctgggccatggcggtggccgcgttgtggtgcatctgctgcgaggtgatgtagtcattgatgatggtctgccggttctccagcgccgccgtgtcggggtagccgcggatgaggtagggtgggtacaggtgcgggtaggtggggttgggggccaggtgtcggggcaggtagtaggcagcggctgcggggcagaggggagctcatgtgaggccagccatacctaggcctgatggtgtcgctccacctgtctggatgccccctacttctgcacccggacagcttctcccacctacatgtgtggctgcccaaagcacaaaccagaactgagcgtcggacagcaggaaaacatcacgccaggacacaagagggtgacttctacgaaggatgctttttgcatcaaagttgtcccaaacataggacatcccaatgcagattaacactccaaagggatgcaactttttttatttctttttttttaatttcttttatttttagagaaggagtctcgctctgtcgcccaggctggagtgcagtggcgcgatcttggctcactgcaagctccgcctcccgggttcacgccattctcctgcctcagcctcccgagtagctgggactacaggcgcccgccaccacacccggctagtttttgtatttttagtagggacggggtttcaccgtgttagccaggatggtctctatctcctgaccttgtgatccgcctgcctcggcctcccaaagtgctgggattacaggtgtgagccaccgtgcccggcaacttttaaaaaagactttcagatcatgtctatttgaaaaatgcatatactcaagtcctcattctatacctttgcattgctaaaggcactgataagtcctgccggaaaagaaaaccactgaaatgtttaaccccacatgtcctgcaaactactaagagaaattctgctccaacctaagctcatgattacactgttgggtcttccaatcccgaggcctcagtttcgccatccaggggaacctgacagttgatgcctaaggagtccctgagcgaacactgatgaggtccgtggccctgttcagcaccactgcagggttctgggagccccagggcaatcacctgcgtccagagggatgccgcggggtatggaggtggggtcgaaggccagggggatgtggctgcgatacaggtccacgccactcacgccccgaagcaggtgctcatagggcgagatggggtgtgggtggtgctcgggcacggtgctgtgcggggacttggcgatctcacgaggcgtcgacgtcagctttcggtcctgggatgccttgctggacgaaaggctgcctgtggacgggcaaggtggatgcatcgggcctctggggctggcatttacggggagttgtttgaggatagggacctcgggatcccaaggaccaggtctcttcattcactccttcatttcttcattgccttagttcactttttgctcactgactcatttgcttttgtgttatagtttttaaaaaattcattctttcatccattcactcactcaatcaattaaaaaatattgatgcagcctctactacgtggcaagcattgttgtgagaactggggtcaccccagtgaacgaaacagaaatcccagccctcacaagctgacattcaatgcgagagacaggtgataaactagcaaacaaatgagaattacagagtgaaacacgctcagaagaaaattttctttcatttttttttttttttgagataagagtttcactcttgttgcccaggctggagtgcaatggcacgatctccgttcactgtaacctctgcctcccaggctcaagtgattctcctgcctcagcctcccgagtagctgggaatacaggtgcgtaccaccacacccggttatttttttgtatttttagtagagacagggtttcaccatgttgaccaggctggtcttgaactcctgacctcaggtgatctgcctgccttgacctcccaaactgctgggattacaggtgtgagccaccatgcctggccggaagacaattttaaaatgtcacagcatgtgatatgaactggagatagggggtctggttagaagcctccccaaggatgtaatatgtaaacaaagacctgagggatggaaagaaacccactaagtaaagatctggaaggcggggacatggcaggcagagaggaggagccacgcaaaggcccccagcaaatactgaattgaccgagctaagcatggccagggaacaaagagaaagagggcccaggggctggggctggggaggacgaaggaatccggctgaatgagaggcaggcagggccccaacaggcaggcgccccaaggccatagcaaaatgtgtgaagttgctagaaggatggaagcagggaagtggaataatatgatttgcatttttagaaagtatccgggtagctgtttgcagagtggattacagcaggaagagggaggggcgtgggggaagctaggtgagacaccacggtggtctgggaggtggcaaggagttggacagggtttggaatcggaggcagagcccacgggcctgcaggtggtttggatgtggtggaaagcgggtggcgaggatatcccaggtgcaaactaagctaatggtggatggggaggcacagcttctccagacaggcgcccaccccactcacgcccatgcacaccccactcaccctcctgcaggcgcggcgtgggctcccgcgtggtcacgggcgaacctcgtgggaggtggccggcaaagggtgccccgtggtcctcataggtcagggggctctgccgcggcttacccagctcaggcacaatgaccggggcgccgcgcgcaatggagccccccgagctgctggcggtccctggccggctcttcaggctctcctcgtagcaggcacgttccagtgcccgggcgtcggccatcacatccagcgggtgcacgggtgggaacgtccggccggggctgccgatgagggagcgtacgtcgtgctttttggagccagtggtggacgcgccggtgtcgtacttgagcggggtgccctggggcagaggggatgtaagctctagccctggccacagccatagcccagaccagctgcatcccccttctgagcctcaaaaagtttgtcatctataagatggaagtgacatctgatgcctccagaggcagggagacagagggctttgctaaccctgagatggcacacttgttacttactgccctgcgcaccctgggcctgaccctggtccccacgctccctggggggactgcagaaaggggtaaaaagttcaacagtcaactctccctgccgcgagtggtgggctctctgatggtccctggagtttgcgagaaagaagcccaacaccctcatgtgggtaaaaaacattcctctgttcagcctgggaccctccatggcccacccaatgccaagcagaaaaagtcagcacccagacccaatactacccgccctgaggctttcagccccagggacactgaggtcagggctgaggtgtttgccctccagacagaaaggatggtgaggaaatgggggggtcacagtccagactgggaccttcgtagccaggccaccaggtcccctgcctcttttcagcaggcttcggagacacttgatatggtgggactttagggctttgcaagcaacaaaactctatttagggatgtcttcattactgtcgtaagaaggggaactgcccttgtttttcaaaagaatattctagaatctggaccctgtcttggtcatgcggtggatgcttccaaggactccataattgcctaggggctgagagccaaacccttcccctggcaatcagggatcttactgcttctgccttctccctggcttcaaaaccttcctacaagctggaacccctcccgggacacccaccccagtccttccgcctcacagccccacagccccgtggtggctcccattctccttccccttcacaagaggccacctctgcccatgtggaaggacagtggccttcaggggctttccaccgaacagctcctcgtcctcgtaccatcggcacggaacttcccctactgagctggggccgcctggggggactggggcctcttgtggtgcaacctgctggtgggtgcagtggatgctgcggctgtaggaacatctgaatttgggtttcacaactgcatttgctgcgtgactctgggtgagtcgttgaacctctctgaacctcaatttactcagcaataaaataaggtcattaagaaaacgacctcagagcattgctagggggtgaaacaatgaacgcatgcaacatcctcaggccgcacctggaccctcacaaagattcaacggaggcagttactcgtcactatgtttagtcctgtggccttggaagcctgcctggcctctctgggactcagtttccctccctgaagaatgggaacaatgtgagttcagtagaatcaggtcaggagcctggtgccccctgcgcagccctggaacacgcacagctgaggcccggtgatgagcagctgggtgactgtaaggtacgcgagggctctcagcctcggtttccccatgtggagaggcccagggcagtgccccacagccaccgccacccctcctagaactgggcccgtgtgcctggccctgggccatacctgcgtgatggagccctccttgagcggccgcggggccaggggcagctcgggcgtgtgccgcagctcctcgcgcgggatctcatggatggagcggcccgcctccttcaccgtggccaccaggccctcatgggccggcttcagcttcagggggcccagggcctgcgtcttgtaggcctcggtcaggtcccgtgagggcggtgggggcggaggcgtgccctcccgctttaggagcttggcctcccgacgcaggtagtcctcctgtgcctccacgtaggaccgagggatccctgccgggccgacagcactgaccctcacgccccgccccacccagacccatcaagagcctccacaccagtgggttctggagctagtctgcctgagttcaaatccccacttgctgtgtgaccttgaccaggaaatctgacctctctgggcctcagcttcttcacacataaaacaagaatattaactgaaccacctcagcaagtcgggaacactatgaaatcatgaagctaaaaccacaggctgggtgcagtagctcacgcctgtaatcccaacactctggggggctgcggcaggcagacagcttgagctcaggagttcgagaccagcctgggcaacatggtgaaaccccacctctacaaaaatacaaaaattagctagatgtggtggtgtgcatctgtggtcccagctacttgggaggctgaagtgggaggattgtttaagcctgaaaggcggaggctgcagtgagctgagatcgtgccactgcactccagcctgggcaacagaatgagaccctgtctcaaacagcaacaacaacaacaaaataaaaaaataaaaaataaaacccacaaagctgccaagttcacagtagctggctgtgccatggaccagccgcgagaacctgaaagagttctcggagctctccaagcctctcccaatcgcatgtgcctcaccaggatgttctgtaaaacgatacgcaggtggcacctgggttagtgccaagcacaggacagttgctatgtgacacctaaaagcacaggggtgatcggtggtattttgctttttgtttttgttttgaaataagtaagagacacccttgctccgtagctcacgtactgatcatgtacatgtgtgctgcaggcctttctgcatacttgtcctgagttcccaccacactctggctgtgtctctccctcccgcgccctgcgtgactgtacacccgttgggggcaacgagggagcagggaacagggcagtaccttgtgtgatggacccgcggatgtggtgctgctctttgaggtggtgggggctgtgtcgctccggcgggatggcacggcccatgagacctgggtaggagagggtgaggccatcattccgtggctccctgagccgacactgggcagtgacaggggtcagtgtttacagccgccagtggtcatccccacgatgatggtggagtaggacccagcacgggaaggtccctgcgctacctccagatggagcctcagaaagcccagcctcggtttccccatctgtaaaacggggtcagccatccccccaccgcccaccagggggcaccgagagatgaagtctcctccctgctatcaccttcgatgctggctgaggagatggctctgcccacgcggccctccatcatgtcataggtgcgcttgggggcggccgtctcatgggggggtcctgagctgcttctgccgtcctccttggagcactgggtcacagacatgccacctggaaaccacacaaagcactcggtgaggagctgggcacgggcccaggaccacggtgggcaggcaggacaggcagagccggtaggcaggagccagcagtgcttccatgctggccccgtcacaaagcctcacagccgaggcctccagagggagctggcagcctgcaggccctgggggcctgccagcaggacccaggagcttttccagggggttgcacggtgggagatgcagggcacgctgcctgcaccctgtaccctagccctccagggtgctctgtctgcaagcaagggtgtgcctgtgaccacatgagcacgtgagtctgtgtccacacccacgggtgccgacatggggcgtgaacaagtgcacacacatgcacgtgagcaaggacgcatcagcagtgtgtggatgtgtggcaggcaggagcacacgtgcaccgatacatcagcagcagagtgtggatgtgtggcaggcagcagcacgcgtgcaccgatacagcagagtggaggtgcgggcaggcaggagcacgcgtgtgcaccgatacatcagcagtgtgtggacgtgtggcaggcaggagcacgcatgtgcactggcacgggtcttgtgtgtgcaggagtggatgtgggcacatgcacgtgagcctggctgctgagaactaagtgggtccatgtacacacatgtaccagggtgcaggcagtacacggctttgtatgtatacacgtgtcacacccagaaacctgtgccgatgtgcatgtgagtgtccgaccacaagtctgcgtgtgcacggagaggtgtgtgttgcaggcagtggtgaggggtggcaggggtggcctcgccaggccaaaggagcctacatgggcccggctcactgctccccggacaggcagagaggtgaacagacggaggtggcccccgaaggtaaaggctgggctttgcccatctagccagggctctccttccagggcagccgagtccagagctatcagaaatgagccccgggagcccccgccccacccctcagagggaatgagcaactgacaggctctcgggcttttcaaccattgcttcgtgtggcccacggcccgtgagctactccaggggttgccaacaggagggtactaggttgctgttcagaaaacgttccaaattaatcgccgatgtttaaacatcgggagatttcagataaaaacggagatgagaaacctggctgaccggtggccgcaggggagtggacggcgtgagcaggcaccacagtcctccccattccctacagtcctccccactccctacagtctcacacctgccgctgcctgcactgcctacctggcccagggagcagacgagagtttaaaggccccgactgaaacccatgatgaagacgatacgctgaaggcctataaaggctcaggcactggtctggggtcccaaggtgggactctacccagtgacctctcaagacaagctcttgactaaccccaccaccagcccttcccaggcttcccgccacccccagggcactcggtccaggggcaccagggcatgagctggcacccaagacacagctgcaggcctgtctccaaggctatctctgtggcagcagggagtgcattatgttcctaagccacacggtgccacctccacctcccaggcctggggagggggctgcgggcacaggcggaagtggatggaggagaggcaattccgggcctcgcagctgcagtgctgagagaggcgcccattagcagctttcatctccacacccctgggtgccctaggctgccaggaaattctctttcccggcactcgattcccttaactccttcctggcagggtctcctcgttctggaacccagagcctagagagggagaggatgggggctccgcagcaagagcctgggacacagtggggcgaggggcactctggccatggcctctttcatggccaatgagagagtgcgtggtttgtcagtacggtgctggaggcctggcggcgtgagctcgggcttctgttccgggcctcagtttccctcctatgcttctaaaaaggttggccatgagtttgttttctaaactgtaaagaactgggcagaggtgggaggcagctaaggccaacgcttccctgctgctggcttgcatacctgcagggataaggaggtcaccacctatcagattgtgctttctgatgtcaatccagccctgcctccctgtgaagctacctcagtgggccaagcacactcctcccctggtcctgggcctcctctcctcctgcgactcaccctcataggacaagacgtggcccttcttgccttcgtagatgacgtggcccttgggcaggctgtcctcccggccgcggtccaagcgactcgggctgtcctcgccgatgatcctggtgatggtgcccttgtacaggacgtcagctggcgtgccctgcaggtgcagaggggtgagcgcccaggaggctgcagcccaggacccctctcaactcaaatgcaggcaaagacgtgcttaaaagcccatgtgcccaccgatgcacacgcgtgtccacacacacactgtctcaaataggtaagagtttgcatggaacaaaaccctatgaggaacctgaagaatgaagatcccttgtcaagtgcttcccatgagtggacgctgttctgggtgctctctatggatttgctcatttaatcctcgaaacaaccctaagacaaccctattgattatgcctgtttcagatggggaaaccgaggcacagggaggcacagtgactttacccggggtcacctggctaataaggggcaggcggggacttgaacccaggcattctggtcctggagtctgtgtccccaccactgcgtggggtctactcagagccttgacattcagttaccgaaaacggtaactggcggggacgctggggtttctgctcctgtgctgtacccgtgaccacgtcatgcactttggtttcctaaaaccaggacaaggactcacgtcagggcagcacaccggaaattttagttctaacccaggttttccacctcggccctcctgacagctggagctggacccttctttgctgtggggctgtcctgtgcactgtgggctgttaacagcatccctggcttcaaagcactagaagccaggagtacacgcctccccagtgtgtcccccaccaagttaggacaatcgaaaatgtccctagagagttggaggcacaatttcccccaattgagaaccactgccatatagggaatgagcttcccgttggaggatgtgttcaagcagagaggagatggccacgtggggcagcatcctgccttgggtgactttcaagaacacaagcatcagagttagaatatgactttggaagcagaatgttgggtgtcaaacagcaactttactaccaagctgccgtgggacctcctttctgagcctcagtttgcacatccacaaatggagaccttctgcattgatgattctcaaaggcatctggcacagacgacgggtccccaaatctcaatatccctcttctctttctagggttccaggagcagattcaacggtaaaggtcctactatatcccaagacctggaccagtgagctctgagtctctggctggacttgcttggctggggacatcccctggcagagggcagcacctggtaccccggggagttcaccgcagatcctggtctttgcggagggcaacagcaagacgccctgaattctgatgagctccccccaaacttcccaaagcaaatactctgagcagcatctccctgctgtgctttaagacacctgtacactaacagtgtggcacaataggtgctgagtcaggtgacagctcggggcagccacctctcccatcaggaaagcacaggattcctgcagcatcctggcgggaaaagccccccaagaggcagctaacacaagtgcacccctttctgtatccagccctaacatcagatggtccatgtcagaactgggtttgtactgcagaaatcagtggcttactgaacaccacaataaatgatttaaaaaggggggctctccatggtgaaactgaggcatctgattttttttttttgagaaggggtcttgctgtattgcccaggctggagtgcagaacactgtcatagttcactgcagcctcaaactcctgggctcaagtgatcttcctgcctcccagtcccaagtagctgagactacaggtatgtgccaccatgcccagccaatttttaaattttctgtagagacaggcctctttttgtccaggctggtctcaaactcctgggctcaagctatcctcccaccttggcctcccaaaatgctgggttgacaggcaagagccaccgtgtccagcttgatgtttttgagctatagtattttagaggtgccatcttcagggacatggacagagaacagaaatccagccggtggcccctgctcttgggagaatacactggacaaactcccattaacagggaagcttctgtttgcataacgtctgcttccaggagatgagcctgtagcctcttgctcttggccccaatgaactctactcccaagatgggcaggaagtccctggaggatcagggagctgggacttccttgacctcccttgccagctgggaaccacgtggtccctgcctatggcacctactcagttaataaacggctctgtgcgtgcaggccacacgctgacttcctcactatctggtagtgagactgcacggaagtttgacccttgcctatctcacatgttttggcagctggctgtctgccaaaagcaatcaaagagatgtgtgtaactgggaggttcgaggaagggcgcgggtcatggccactcaggaacccagagcaggtggatgcctgggaacttcaaaggtccctacgacttcaggagaatgactctcccaggaatactgttagcaaaggggaaacggagtcagggcaggccgctgcctgtctgagtaggtggtggagctggcacccgagggccctcagcctgacttttgtccaaagcacttgcccttcccactcagcacagctgcctttgaaagctcagatttttaaaacctgcagatttcagagaagggcaaagtgtaaatggctcctctgtggtgggatttgacgctgcctgagtgaaaaacacctccctgtggaccatcttgttgcccgaagctccactgttagaacatgcatgcacgtgtgcaagtgtgtggacccacgctctgtcactgtgttctagagccagacacacgtggcacaaaaccttgggtccacagctcaccagctgcaaggctggggcaccagtcctggcacgattcaggaaccctctcatgctctgtctttgcacatgctgttccctgagcctagaatgctgttccctgagattcccgcatggcttgcaccctcaatttcttctggccacagctgacatgtcaccttcctcacctgtctaagcaatgtccgtggccaggcattctcagccgcggtacgctcacattctgcctgcctgctcggttttcaccagcctacttatttaccctggtctgtttccttccactacatggcagctccctgaaggcagagttttgagctgtgcttggcaatcccagtgcctgattccatgcagactagatgaaagttcatggagtgaactgctgtcccccagtcatcaccccatcggctgaggctaatggtttggtgacaatgaggggttataagatgggctggccccgtgctggtcccaaccgtccttcctgccgcaccccaggacacctacgtgggtgatggagccgcggtatgtgatggcgctgtccgagggcacccgtgtgctgggaatgcctttggtgatgcttccgcccggaactgagcccagagctgtccctggaagacacaagatgtggggctgagggcgtgtctgtggcccttccttccccaggccccagtcctgagagccaccctgactgagagacccacaagttgtgctagttgtttcaacgcagagggagtccccctacccctaaatggtgagggagacagctgtgaagaggggcccccagaccctctgggagatgacacttcccagcaggttttgaataaagggccctttgggcacccgaggaacaggggcagatgctgggggcccagggcagaagggccctcacctctcagcacggacgcctcctgggctgtgggcacccccaggctctccggtggcccagcctggccccgtggggacagctgctcctgcttcactccgctgaagggtgctgaggaccagtaagaggagcgagtcacgtgctgccggagcagggtcccgggaggcttgtccccacccaacctgagccaggggctgggaagcgctgcccctccccaccatgttccagccagggctgctgaggggggacctcccagctgctacctggagtaccgtgggccaagataccccttcctcccccgccccacccacaggacagccagagcccagcctgagccacccagacggatgggccaggagccttacccagctttttggggtccatgggcaggggcagccccatggtgacagggcccaccggggccttggcatgctctgagtacgggacgtggagctggaccgacattccctgtaggggcggagttgtggggtcacaggggcaccctggtccctcccccacagtccagagtgcctgacgctcctgttcaaaaagcccacgtgtgggtcagaggctggggctgctgtccagctgtgtgacggcagacaagtcactgctactcccaagcctcggccccctcccctgtgaaggggccatgccctctgagccccttgcatttgcccttccatttcgcagtgggggaaacaggaggttaagtaacttgcctgaggccacacagcctggttcctgagccatgcccttgactgcaatacagagtgaccccccagggacgaggccctgagtgcctggggcaggacccagccagctcagaccccagatgcctgagtggagatgacccaggcccccgagagcctggcccccactcagacttcattggtcccattgcccccactttacagataagaagactaagcccccaagaaaggaagggctaccactcacttgggagatggcacctatttgcctctcgaggacgctggggtgcttggcagaggagatgaggggaggcgggttggagatggtgggtgggcgcggcaggacgggccgggcagtgtcatggaggcccaggggcagtgggtgacctgtggagcacatgtctgtccattgtggggcccaggagcggtcacgtccctgccggacacacactccaggctgcactccacctcttccctgtcctggccaggaagtgcccatccatgcgcactcctctattgccctgcctggctctgtcctcattagtgacccgagtcctaggtgcagacaccactatcctggggaagcctcccacctcacccactgcccaggccctgatccaagcgccctcaactctcatctggatcccctgtctccccatttccactgtagcccccagtagccccttccccttataggaaccaaaaggacctttttggaaaagtctactggtgcacaccctccctgtgctgtgtgccctcgatggctcccactgtcctcaggagaaagtcttagcccccgacttggccttcaggctcgcctgacctggcccctgggtctccccagctcactgggcaccgagcttcggcagtggtggccagattcagtttctcaagctttgcctgctctctcctgcctctgggcttttgcacttgctgttccgtctgcctggcatgactttccctgttcttctggctcccttggcccacgcatccctcgggaccagcctttaccaacagcagtctgtaccagcccccggctgtgctgctttacagctggtgaggcccagcaggactgcaggacctagaacagggccgaaatgcagcctcacagagtctgtgaaccaaggtagcgcctctgctccctccccaggctcttctaccatctgcccattctctagctctaagccgtcaacggaaaacatagctcccactctaagcctgcccctcaccagctcaagcacctgctgtggctccctcttgccagtggcttccatctcaaccctggggcagctttcttaaaagatctccccctttccctccactgaccaggctgttcctccagccaggtcccataaggctttaagatgcttctgtgtgcagctctgagccagtgcaaacagtgcaaacagcgattgtgcactggctgaagaagcccaagctcgggcggagctacttaccaggtggagcgtaggagaaggctgaggggtccggggcatgcggggaggccttgatcacctcacgggggggcacggggaagggcaggccggaagtccagcaaggggggtccccaggcagcttctgggcctcggctgcgaaggctgggaagaacacaggcttctctgctgagggcaggaggtggggcagtcagacctcgggagccctggctgaccctacacaaatggccttcctgcacccacagtagtggtggcctgtgacggcctgggctcctccgggaagccccccaagtctgcctgcctgggcgctgctctgtaaccccatggtattctgctcagcaggggaggggatctcaaggtctgagctgggggctctcagctgccgctgaggacgagaacgggaccctctggctttgcaaccccacaagcactcaaccaagcccagcaagccaaggtccctggacaggcctctaagccaggaggtggcaaatggtatctcagagggtctgtctgccccctaatttttttgagacagggtctccttctgtcactcaggctggggtgcagtggtgctgtcacggcttacagcagccttcacctctgggctcaagtgattctcccacctcagcctctcaagtagctgggaatacaggcgcccaccaccgcaccatgcctggctaatttgttttacttttgtagagatggggtcttgctatgttgccccaggcttgtcttgaactcttgggttcaagggatcttcccacttcaggctcccaagtagctgggactacaagcacgtgtcaccacaccatgcttggctagtttatattttgtttttgtagagatgaggtcttgttatgtgtgcccaggctggtcttgaactactgggctcaagagatcctcccaccttggcctccagagtgctggaattacaggcgtgagcccccacgcctggccccgccgtctgactttgtgaatacgcttttactggagcgtggccacatctgtgcatttatgtattgtctatggcagagctgaatccttgcaacagagattgtctggcccacaaagcctaaaatgttcactctccggctctttgcaggaaaagcttgctggcctgtgctctacacaatgttgaaggaggtaacctgtgatgtgtgtgtgtgtgtgcgcgcacgcgcgtgcacgtgtatgtgcatgtgtgtgtgagtgcatggatgtgtgtgtgcgcctgtacacaatgttgaaggaggtaacctgtgatatgtgtgtgtgcgtgcgcacgtgcgtgcatgtgtgtgtgagtgcatggatgtgtgtgtgcacctgtacacaatgttgaaggaggtaacctgtggtgtgtgtgtgtgcacacgtgcgtgcatgtgtgtgtgagtgcatggatgtgtgtgtgcctgtacacaatgttgaaggaggtaacctgtgatgtgtgtgtgcgcgcgcgcacgtgcgtgcgtgtgagtgcatggatgtgtgtgtgtgcatggatgtgtgtgtgtgcctgtacacaatgttgaaggagataacctgtgatgtgtgtgcgcgtgcatgtgcatgtgtgtgtgagtgcatggatgtgtgtatgtgcctgtacacaatgttgaaggacgtaacctgtgatgtgtgtatgtgcacgtgcacgtgtatgtgcgtgtgtgtgagtgcatggatgtgtgtgtgcctgtacacaatgttgaaggaggtaacctgtgatgtgtgtgcacgtgcacgtgcatgtgtgtgcgagtgcatggatgtgtgtgcgcctgtgtgtgtgtgttgtggcgggcagtggggggttataagcccagaccctccaagtaacaaccacagcgtcagcctcagtttgctgagtggtactcagcacaggcactgtgctcagcatcccacggcctccatgagcctccggttaagctcacacagagactgctgccagacacattttacagaggggaaactgaggtacagacacaccaatgggctcatctgagttcaccagcaaatacttagccgagtcaggatcagaagcccactgagccagtgcaagcagcggttgtgcgctggctggctgagaagccaagctcaggcagggctacttaccaggcggagtgtgcaaagggcattaccgagaggtcatgctctctcagggctccacggctgacagcaatgtaagcgtgttcactcatttattctcacagcaccctacaaggaactgactgactgtccccatttcacagacgggaaaatggaagccgagaggttaagccacctggtcaaaggccccagctagcaagtggcagatagcggcttcgaacccaggcactggggctgcagaccatggccttaatccagactgctatgccacatggcctgcggcagagaagcaatgatgggtcctagatttcaggcctggggagatcctgtaaactcagcggggccccggggctcaggcctggcttcatggcatcttcctgctggcctctcgccctttgctgaaatctgtcctcagctctgaacctctccctgaggaccaatcctatggagagataaccggccaagaagttgagcagagacacaacttgggaatgacggagccctctgggttctgggacaggaatggcaggcaggtgtcatctatcacgccgcctccagatgaacaaaggaggttctgagggcccatcagggtgtgacagcggaggagagtgctaagatcaattaatgatgcctgctgtgagcagagcaggtgggcaagaaggcctatgtaccaaattgcccccaattctctccttgaagactgtttcccctggacttgtgccctggcgaggtgggcagcccacaggaggcagggggcacagatgcaggggaattctcattcttaaccagtccccagtggaggcacctgtacagggcctgcctcacatctggagatcctgcaaacgccctggacctggcccctctggctacccagccctgtaagcctctggtgcttcctccagcccagttccagagagttgggagagagaggaggggagctgttcgatgctggaaggcaaactggggctaggccaggctgggcgggcggccgagagcctggagagacaacctgttcctccagttgggcccagggggccccgagggacctgcttggctgagccgctctgtgtgggagccaggggcagaataggctggcttcctgagagaccagagaggtagcgctgggtgtcaagttcatgtgtgtccctgcgggagctgagctgcaagccaggctgtgcaagaaaggcatgcagggcctaacgccaggtgcaccgtccccacggggaatgaggccaggaaacggcacaggccctggccacaccaacgggctgagtgccagccgcgggaactgctggccggtggctccctttctcccaggacaggggcctgcgacctggctcagcaggacctggctggcaccgtgcagttccagccctgatcagatctgacgctggccaaagctgctggggcccctgacatggatacacagctccttcccgggctggcgccccaaacctgcaacgtctcccagagccacaccctgggccgcacactgtaccctggccccaggtagcccagccctggtcatggggcatcccagttccagcgagacatccctggcgtcatccccacaccgggttcaacgccccactggctttgcctccaaaacaaactcccgatgcgcccttccttccacctccacggccacctgtgcggttcaggcagcctctgtcgcctgccaagagctgcgctgtgacctcccgctgctgcccttgactcaacaacggccagacagagctttccaagatacaaatcagataacaagcacctccttccccttccgcaacacacgctcacttcaaatccctccagcagcccctgccacacctgagacaaaatccactgcccgctgtggcctgagaggccccacacaatccggtccccacttccctcactgtccacccgcccacccttccctggccacaaccacccccggcgactcctcacacaccccgagcgtgtttccacaccagggcctttccctgtgctgttccctctgcccgcaatgcccacccagagagctcccactgcggggctgcttcccactccacagggtccttcccggagccgctcttcactcaacccgttttgtttctcatggtggatgaacgactctaaaaccatcttgcttcgttacgtgttccctggtttaacatcctcctcactcaaaacaacagcagctccccagagcagagacttcctcttctccctacctaatccccgctctgccagcatggtgcctggggccttgggttttcaacaaatgtcctgacccagcagcctcggtggaccccggaggcagaggttgcagtgagcggagattgtgccactgcactccaacctggcgagagtgacactccgtctcaaacaaaaaaaaaaaaaaaaaaaagagaagggggatgtcacacccaaggcagcggggaggggacagctgatggtagctccagtcacccggatttgtccctgggctgtgctggtcaggaggtcggcctggtgtcctgctgccctcagacctttggagcagcctgccagcaagcgccggggctagcccagggtggggaacctctggggaagcagcccccaacacctgcaaggcacaacagcacctgctgcgtgccaggctgacctggagaagatgcctctttggggacacaggttcagaatttcttgggcctagtgggaagtggggcagagattgaagatccagagaacaagcaatcacgcccgcctgtctcctgaccttgagcttcacgtgatgacagtgaggtgtgcccggggcagtccctgtgacacagcggctcgggagtcacccccaaccctggctcctggtgaacccagagacctgggcctggagcaaggtcaggatgccagctggggagggcagcccttcctgcccaggccccagagctgctgccagccgggtgctgggccccatctgtgattccagaagctcctgcgtggactgattcacaccgaatcagaggctgggctgtagacatgtttttgcgtgttcacaatgcttttgaaaattttgagaagttgccagtgttgagaaaccagggaccagggggatttcacataagatggatttctggctttgctggaagaaccaccccaggcctgatttgccacggggtgactcttggccaaggccaatacgtgcccactttagagaaaacaagagttctccaatttgccgcagtccctaccattcccaactgcctccccctgctcaactgttccattcgtttactttgctttccctgccactgtggccatggggtttgcagcagctgctctagacacacaaacatcccttgcccgtcagtcccctgctgccccagccccactcagccactggtgtgcactcaccctccttgtcggcggggggtgccgggctcctgctcttgccccgggggctgctgccaggctgctgaggggcgtcgctctccggctgcaggttttgcggtggcggtggggctgggggagctggcttggtgggagctgcgtcctcccgggggggctcatggactttggtgacctgctgagggaagcaggcagaagtgagcattcacagagggtgtctgaaagtgacagggtcagggagagacatgcacgcgaccagcctggaaaccaaggcccgggaaagccagcgacatgctcaaggtcccaggtgcggcaagaaagggaggtcttagcacagagcacatggggaagcccacctcccagaaagcctggcccagctgcccggtggtgaacagggggagctcacctccccagaaagcctgccccagctgcccggtggtgaacagggggaacccacctccccagacagcctagcccagctgcctggtgatggacagggggagcccacctcccaaaaagcctggcccagctgcctggtggtgaacagggggacccacctcccagaacctggcccagctgcctggtgatggacagggggagcccacctcccaaaaagcctggcccagctgcctggtggtgcacagggggagctcacctcctaaaaagtctggcccagctgcctggtggtgaacagggggacccacctcccagaacctggcccagctgcctggtgatggacagggggagttcacctcctaaaaagcctggtccagctgcctggtagtgaacagggggaacccacctccccagaaagcctagcccagctgcctggtgatggacagggggagcccacctcccaaaaagcctggcctagcagcctggtggtggacaggaggctagagcctgctgtgactctctcctccagctccttctgtggacccaaatcctctgggtctcagggaagccaggactgagcaacaggattctgtgggcctcggggactgggccgtgtagcctgacacgccctgagcccatcactcaaagtcccaagggaccaccagcctggtcagctcagggtcttttagcccggagcccccagttgcaactgggaaggccagactcacctccctggagaaggcacctccaagggcccacgcacccagctgagagaaccttccaggagggtgttcccagagggccccaggatcagaactggtaggccacccttccctggccaagctgttgctatagctgagtgggtgggggaagctcctgcctccccatgacccagtatctaatctgggggttcaagggtgctgcggggtggaaggggggaggccttaggccgccagttcccgccttcactgggagccccacccggtacgcctgccagcttccccagctgttcccacctcagctccacggggatttctccaggaaacagaagcggatgagctaggctgcaggtgcatgctcccgcccgtgggattctctgtctcaatgaatgggaaagtcaaggtcagggtggactctgtggggctctgggggtgggcactcacgatgggggggatggcagccgctcgctgcttcagctgcttcaggtccagtggcttctggggtgaggcattggcccgggggtcgccagtcggggtgaggaggctgggccttggggacagcagcctgcgggcacacgagcaccatcagctgggggcccacagccggactctcccagggtgggggggctgcccggttttgatggcctctcctgtctcaagccctggggacgaggctaaggccctgagacacgaggcgactgtgcagctcacccagataatgtcaacggtttctcttgggaaaacagaccaagatttggggccaggggaggggaggcacgagtgggcgggcaagtgcctcctcactcactcccctggttcttgcaggccccatcaggggccaagccagcctcccaccccagcctagaggccagccgggcagtgctagaggcccaggctgggatcaaacatccccaaagacatctccaggcaaggaaaatcccagagaagcccagacctggggcccacaccacacgtggcccttccgaagctgccagaaagccaaagaatcagcccgattcagggacagagaaatgaagagattcaccaagagattcctcatcactcgaatctgagaggctcgggtgccagggcaagacagtgggcatggagccgaatgagctccggttaccagaggcaggagtgggggagctgcacccacttcctagactctctcccacacactatccacgaaggacgaggacatgataacaagggcccaggccacagactttgtgtggaggggcaggtagggcctgcccactgtctactcattagccacagtcgcagtcccttcctctgtctgctactgagatgcgcgaccagaggccgacacagggtacacggtgcctggcagagcgtgcattggggtgtggctcccaagctgttcggtgggtgccgtttccttcaggaagccttccaggatttctaagtccccagcaccgggtatagcacctgccataatccccatctggctccccacttggcatgaggtctccaagggcaggaactggatctgctccagcctgagaacccttcacctgcccagtgtggctgcccggggctgcccagttcttgactccctcctgcaacctgcatttgctaggcacaaagcagcctagcctgcatttggatgtatggaggcagcccggcctgcatttgggggtatggaggcagcccggcctgagtttgggggtatttggaggcagcctggaccgtgtttgcgggtatggaggtggcccggcctgcgtctgcgggtatggaggtggcccagcctatgtttgggggtatggaggtggcctggcctgcgtttgcaggtatggagatggcccggcctacgtttgggggtatggaagcagcccggcctgcatttgggtgtatttggaggcgacgcagaacccagtctctgtcctaggtcttccaagctagtgaaatgaccacatggcaggcgtgagggcagcagccacgggcctggaattcagccagagggcaaaacttctgggtgccagaagctggcaggtcctgtcggcacagcccctactctgtgctgtgaccacagtgacgacgtcctatgcagactataagtcacagcctactggcctcgaggtgagagctgtgacaacagggacacaactcacaccaccccagtccccagctgccagtgctggatgcctggcgcccagaggcacccatctccttcctgcagatgagcagggccgatgcccagggtgctgaggcccctgccggcagtcccctccttcaatctctgccatagcaggaccatggggccaccggcatgtgaccggcctgttctgcaggtaccagcctgctgtctgcatctgccacacgctcagctgagcggggagagcagacacagactcggtgatgcctgcttaggctgcccatggcgcacagacgggggccagacgaggaaggtcaccctgacttctgcatgcacctccaccgcccccaccgccagcccactctcctccctcccctccctccacctgtccagaccctgcttgatctcccaggaccacctaaagcctctcctttggccactgccatgcctcactccctggacctgggcccagctgtgctctccccgccatcctcaaggtacagacaaggtaccctgacccaggtccaaacacagatggtatcacctgtcccaacattctccacctgcggcttcaactgccgccacccctatgtccctccccacaggtttacctaccaccatccgtttcaaccagctcgcacttgcaagctgaaatttaaaagagaatgctgcagccactttggaaagcagtcggtgagccctcattgccctaaacccagcactgccactcctaggcacacaccaggcaaatgagagcaaatgtctatgcagaaacctgcacgtgcccaccactgcagcaccgcccagcgcacaacagccagaaggcagagacaacccgacatccaccaagagacgaatgaggagacaaagcgtgccctgtccgcacgatggaacacatggccatcaaaaggcatgaggctctgacacgggctatgacgtgggtggaccctgaagacacgatgcgcgtgaaacaagctagtcgcagaaggcctctagtgtagattccgtttctgtgaaaagtccagaacgggccaatccatcggggacagaaaggagatgagtgggtgccagggctgggaggagggaggataggggtgactagtgatgggcatagggtttctttcttagtataacactgaatatactaagaagaactgaatgatacacgttttttttgagacagggtcttgctatgtcactcaggctggagtgcagtgctgtaatctcactgcagccttgaccccctgggctcacgcaatcctcccacctcagcctccggaattgctgaagctaaaggcacacatcaccgtacctgactgatttttgcatttttttcttttttgtggtagagccaaggtttctctatgttgcccaagctggtcttgaactcctgggctcaagctatcctcctgctttagccactcaaagagctaggattgcaggtgtgtgccactgtgcctagcctaaatgatacgctttcaatggtgaaatgtatggtatatgaatgatatcttaataacggttacaaaatgaaatgaggaccatactatatgctagccataaagggttcgacgtatcagctgtattttctctatgaacagtaaaaataatatttttatatgtgtgtacaaatagaaaaataaaatataaattttaaggttgaaatgcaaacgtttgtatatgtgtaaagataattctatagagataaaaatatgactttataacacacacaaaacatgaggtgccactgtcccatgcagtctgcccgagagctcgcgttttctatgtggggcctgagtgctccctgtgccttggtttccctgtggcccctcacctagtagggtgtgggcagtcagattggcagggggtgagcgggggcaggggctgctgcccagaagctctcagcaggtaccctctggggggcacacacagaggcccaaacccttcttgagcccccagagcaagtggggactgtggtcatggaggtaccactttatagtttacaagaggtcttctgatcccagccagagctctctcatgggtaaagaaggcagcagccagcacaagggctgggttcaagttctcgaggggaacgagagtcctaagcccccagagggagcggccaccaatagtggaggaggaaggtggaaaacgctcagagctcagggcccatctgaccgccccttgtcccgtagccatgctggaggagcgccacctccagaagccctcctggctggctctccccaccctccactctcccttctttgttttattttatttatttatttatttttttggagacagagtcttgctctgttgcccaggctggagtgcagtggcacaatcttggctcactgcaagctctgcttcctgggctcaagtgatcctcctgcctcagtctccctagtagctgggattgcaggcacacgccaccatacctggctaattttttggtattttagcggagacaggctttcactatgttggtcaggctggtctcaaactcttgacctcaaatgatccacccaccttggcttcccaaagtgctgggattacaggcatgagccaccgcgaccggcctctctcctttgttttcttggaaggcagccacttctattttcctttctggcggcctgggtggggcggggactctcagggcctggcacagagtatgtgtctgggaggggccccaccctgcctacccagccctgcagttgcgagcaaaggctcggatcccctctctgaccatgtgacttagccaactgtgcctcggtttctcaatctggagagtggagacgaaagcttcaagggctgtccgtgggtgggcgtggggatgctggtgaccagcacgtggggccgagtgggtcgggccaccttctcctcactgtcattttccttcccactcatgaaggccggttggggggcagggcacgagagggggaataagggcctggggacattcatcggaacatgctgggcctgcaacagtacatcccctctccacccagcccttgcctcagtttccccatggtcatcaagctgggacaatccttgccaccatcctagggctaggagggagagggagggctggtttgtgaacaggcatcccttgcctctccaaggccccaagataaaaccctgacccgtcacttccacccgtggggcctgcccacctctctgacctctccgccctctctgccctgggctgctcactccactctacaccctgctataggcctctctgctgtccactggacatacgctcatgcggccacagggcctttgcactggtggttcccagggggtctggctttccctcacactaaggctctcattgccctccaatgtcacctccccagaggccctccctgcctgaccagcccactctcccctgctccccatgccccatctgcccatcacccactcatcccgtaaacaatggtttccttctccatgccctcactagaatgtaagtgcctggagtcagggccttgtctgtgcagtttccagcgcccccggcgcctggcgcatgctggtgccatcagtcacttgcagaataaagtaacaaaggtgaaattgctgttatgatcttccaaaatgccagagggacagctgaaggagctgcactccagccccctcttggggtgacctctagggggtgtcccaaagcagatccaaaggagggcagctaatctctgagcgcccactgtggcccgtcattaactgagttattcttgcaataagccatccacgcccaccttacagatgagaaaactgaggcttgggggaggggactcccaaggccaggccctgccaaaaaagcacccaggcaccttctctgaagagtaagagaggggaaggcaggcaggctcggggttttgcaattgaagccactatctctggtcgtctgccaagaaaacacccaggcagagccacctcgaagaaagtgccagcgggccgaaggagaatgtgattttctctctcccaaagtcaccggggcggggggccagatgagagtcatcttgcgtccatccaggaacacagagctcccccactggggctgccaggcaggagggatgatactgggcgggcagccaggagcaggggtcgcctggggggcccgcccgtcccaccagcccttcccgggaggccctggctgccagggcctactctgacgcatctcgtccgcgtcctccagcgtccgcccggccctgcgcagtcgtggccggcagagggaggggtggcgggctgccggccaggacgaggtcagcaggctggccagagtccagcctcgttcactgagagggcaaagcaggccccaagggcgggggcctgggcctagtcgcacagggcgggacaaaccaggtgtcctgactcccagccgaggactcctgcacccgggggctgtgtgctggacactgggcaaggggtggacgtacgccaggcccagctcggggagggaggacacggccctgggcggggctgcaggggagaggacgggaggctgcaagtgccctgcggggcctcaggcctagcctgagtgttctggggacggacaggatgcaagctgatcccccggctccccagtccggggccagccacatggacccaaaatacagactctgggaggcagcttatcaatggggctgccccatgacctcagcggtcccccggcgaaggcagaaacatgtgtttctatgactctgtccccacagccagcaggagcggggcggggagccgtctgccctgaccccgctatccaggcacaatggccctggctgcctgcctccagggcagacccagccacaccatgaacactgttttccaagctgggactgtcgggcaagaagctcagggatttggtgccctcagaaacccgcaggccaggcctttgctcatcacagggtcagggtcaggccgtccacttctcacacgcatgggcgcggttcctgttggcagtggttcctggggaccctgagattttgttttgtggaacctatagagatccgggtgaacctcagttcctagggaatgtcctaggacttccccctttaacatggcccagggtgaaccccagggcagagacaagggccccgcatgaccctgcgggtctgattttcctccctcgcttgctctgcccaggaccattccaagggacttgggaggggagaaaacagaccacactgtagttgaaataaaatggcctgcctgccccaccagaaaacaattcctccagccatccagatgtgagcaggacgcagtctccgcgggtctgccctctgccaaccgagattggccctaacttgggtagccatctttggttctgggctggaggccttgaggcccaaagcatctgtgctgaaaatgggtaaaaggtggcattctcagggatgtggggtcacccaggccaggagcaaagacagaggccagaaaggaaagaacacacctcagagacatcaacacccaaacaggacgacactggggtcctccaggccaccccagctggagaggaatttgcaaggggaacctctgcacctgtgatccaaggtgatcacctgtgatcctgagccctggacccttggctgatgggagatgagccaccaaaaacatgttgaacctgtggcttttccccaaccccacggccaccacgctcgcatctccatcaccagccccagggcacttgcagctgcctcctgactgtgcctctcactcccagcaaatcccccacatggtttcatgggtaaatcacatctggctctcttgggagaggctcgtaaaggccttctcactgccctgagaacaaaatgcagcccccacctgccagggcgtgactcagtgcccccacccccgtgagagctgccccccgtcctgccaggctgccccctccctgagccaccctttggcacctgaatccaccaagctcattcccacctcgggccttcgcacttgctgttcccaccacgctgagggtagaactgtgtccccccagagaaggtacattcaagtcctaacccagggtctctgtgaatgtgaccttatttggaaatagactgtttgctgatataatcaagttaagatgaagctgcactagattaggacagctgcccatccaatgcctggtgtcctcagaagaagaaagtgtggacacagagatgcacagggcgaaggtcatgtgacagcagagccaaagacggagtggcatgccagcaatcacgaccgccagcagcggccaggagctggaagaggcgggatggatctgcccagaggctcggaggctgcgtctcggcctgcatggtgcccccaggctcctggcctccaggactgtatttgttaaaagccacctggctcgaactaccttgtgagggcggccctaggaagcgagcaggctgcctggcacactctctccctagcgctgcccagggctgcctcctctgtccgggtctcagcttggatgtcacctcctggggaggtcctcccggccacacctccgccccttcctggcctgcatctctcattcctggactctactccaagtctgcctccctaaccacacctcgggctcccccaaagcaggcagagccagactgggtgcggctgtctaagtaggtagtcgctgctcagtgtctgcagacaaaagccaaggttagggctgcctggcgcccactcaccggttcttgtcgccgccctcggcctcatccacctcgtctgcactgcaggtagcactggagtcgctgtcctggggggcgcccgagctcttggctgtggtggccctgccgctcccgccctccttcttctctgccttgagcgccccctcggccgtggcctcagcggcctccgcgtccttgcccttggccggcccctcctcggcttcctccgtgcactcgctcttgacgggctcctcggccttccctgtgtccactgccagctcctcagccgcggggggcttctgctcctccccctcctccactgggggcgctgctgcggtctcctcctccttctcctccttggggaccacaggaggaggtgcagagggcgatgggggtgctggtgggggcgtaggggctccggtggcttcagaggccggggtgggctcagtgggggccgggatgtcctccggtggtggggtgggtggccctgggggtggcccgtcggcgcccagggtggctgggggcttgggcccattctgccctgtgtccttggcggcctcagtgtgaggagaggggatgctctcggtgtctgagctgttgttgacagtggctgtgcagggcgagaaggaagaggggatgagcagggtctggcggggcctccagaagagatgcatggccctgaccctccggatgaggccgctctgtcgcctgatgccaaaacagccccgaggctcctacacacctgggctgctgcctagagccccacccctgagacaaagcccctgaccaggcccctacccacagctgctgccctcgcctggccgcctttctcccagactgaccctgctggcataacctggttaattcccaaccccaggacctcctggtggtcagcacccccgacagatggagccagcctgagggtggccgtgggcaaaggccttcgtcctgggggtctccatgttctcatctgagctctaaccccggctctgccccgcactggctgcgtgccacgggaaactcaggttacctcttgggcctcagttttcccatctgcagaacgggagaacaatagttcccatctcacagggcggagaagctggcaattgtgagggcaagggcaactgcctggtgactgcctgctgctgcaccaccatcgccaccatcatcgtcacatgacagtgtagaatgcgctcagtgtgagtacaggggacccgggcacagtggacaatgaggccagtgcgtgtgcaggggacccgggcacagtggacaatcatgaggccagtgcgtgtgcaggggcccgggcacagtggacaatcatgaggccagtgcgtgtgcaggggccccgggcacagtggacaatcatgaggccagtgcgtgtgcaggggccccgggcacagtggacaatcacgaggccagtgcgtgcgcaggggccccgggcacagtgggcagtgaggccagtgcgtgcgcaggggccccgggcacagtggacagtgaggccagtgcgtgcgcaggggccccgggcacagtggacagtgaggccagtgcgtgcgcaggggccccgggcacagtgggcagtgaggccagtgcgtgcgcaggggccccgggcacagtgggcagtgaggccagtgcgtgcgcaggggccccgggcacagtggacaatcatgaggccagtgcgtgcgcaggggccccgggcacagtggacaatcatgaggccagtgcgtgcgcaggggccccgggcacagtggacaatcatgaggccagtgcgtgtgcaggggccctgggcacggtggacaatcatgaggccagtgcgtgtgcaggggccctgggcacggtggacaatcatgaggccagtgcgtgcgcaggggccccgggcacggtggacaacgaggccagtgcgtgtgcaggggccccgggcacagcccacaccaacggcctcagcatgggttttacacagcaggagcgcgatctgtgctggcggagtggcaggatgaaagcacgcacccaaggatggcaaggagagcccagccgcattcctggctctctagcccccaaacccacacccggctcttctttgagtctcaatgtctcccattttctgtaaaatggggatacttgaaaacccctgcatttgctatcagggaaatcaaacccggtcggagacccaagcgtaccagtgaaaatcagcaaagcagtggagacgggaaactggtctgctggagtgagcccgggaccagcatggggaacagccactgtgctgggaaggaagcccagaggccgcggagcacaaacggtggcgctcacagaaagaggcatgtgctcagaagcggggttccttgtggaggaccggggaccttgggatgcccgccccggcccggccctaccccccaggccagccggccacattcgtacctgggccactgcattcccctctgggcacctcattcccagaggcatgtaaggctggaaggaagtcagagaagagttagaagtgaggcagcaccaagtagtgggaggggagggaggaggcaacgtggccaagaggggcctgaagcccagtgcacagcagtgaggcctcgctgctgctcgctctcctgccccgactgcccttctccatggaccgatgagccctctccctctgggctctggccagcggccacaggtgacctgcaatagccctgagcaggctggtccaatggcctgttcaaggccagccaataatggggttgttcagggtgaaaagtgagcttcagccactctgggtgtccttgccctaagtcatcagcctcctggtggaaccaggctcccaggatgcctggagtgggaggtgttgacctcagggatgggcaaggttgcagggagaggcttttggggctgctggggcctcttcagccttcattgcccccccaccaaccctccagtctctcctgcttctcacctcccttcaggccccagagcagaggccaccctttttagaaacaatagcaacagcagcaacgctggctgcatacaggccaggctccgtgccgagttcttcacacacgactcctttaagacctctaagactgggaccaccaactctcatgtgcagatgaggaaatggaggcagacaggttaatcagcttgcccaaggccacgctgtggaggggagagcactgagcccagcttcctgtgtccttaacccctggccttcctctgcctggtgacttcagcaatgtcattcccttccttccacagtcagagtacaggacgttgggaggccaacgctgagggccccaggaccagggatgaaacttctgggtctcagtttgttcatctacaaaatgggcagttaacttctcggtctcacagttatcaagggggtctggggcaggagcctgcatgagaagcactccaagggcttgtgacagtgcaggtggctgcactatgccccgaggtttctgattcagtacgtgtggactggggcccaagaatcagcacttctaacaaatcccagggaacactctgccaccgctgccctagaatccaggtgaagtgctttgtgcagcatctgacacacagtaggtgcttaacaagagtgaccaaaaaaccaccaaaaataaaaaatagaaacacaccaccagatggcctcctttcctttctgcctggaggtccccagtaccgggctgcctgggtttgaaccccggtcaccaaatgcgccttggataaccccgctatgcctcagtctccccatctgtcaaatgcggagaacagcatggcttcattcactatgaggatactattattattactggagaaaccactgggccagggtatcactcccagccccgcgctggtgtatttccagcccagatgcaacaagacgctttccactgcccccggggaggggcctgcagtgccgctggggctggctgggtctccggggagattcaggcagggcaacctcaggctccaacccagcacctgcctcacctccccatcctgagcacaagagacaggtcacgcagcgtgcgctggctgggccggcagaccccgagcctaccggctatgtgctgggacaccccatgggaggggttctcctctcccctgggctcctcgtccttaagatgggctaacaccctgggcaccaggaggcttaatcagggcctctcacctgccgtccctgatctctcagagcagccacggaagaccaccactgtcacagaagcctcagctccagccacctcagccctccctcctcccccacccagcagagcatgcccctccccgtccctacggggctacgtaagctctgcaagcgatgcgggggtcgttgccacacagtcctgggtggcgtctgctccggttttaatgtgtggccatggcttggcttcctgaaatgctcccaccaagcctgcatcccgcccattcagacactggagggatatttacagaggggactgggtttctgctcccggggtcttctcctggctacagacccaggacccaaaatgggacgacccaagggactcgtggcccaggccttccttccatcagacactagccaggcttctggtcaacttgggtcagagagacccaaagctggtggggaggccagactcagtgtccctgacccgcccccaacttgagatgagtcacccaagggcccagttgcccatttccagcgggaagcggggattcgggctggtgaaaccctgcgggctggaggagcctggatttatctgcaggctgggcttatggaaccaggaggtgacttgcaccttctgccagggagaagccagggcgttcaaaggcagagagggagggacaacaggaacaacaagaaggaccccagacggggcaggaggaaggagggttgaattcaccaaggacttgggctccgccgggctgcttgtttctccttcagagagtcagaaaggagagtcagggacactcagcagagaagggctgaggtcctccaggggccttcggtcacgccacagggggagcagtctagacccccagcttcccctttgacagggaaaaagaggcacagggtgggggtcgaaggtggatgcactcgtgaccgagagtgcggggccaggtgtcggcagcccgtgttcagttcccgggtctatacacactgataacaaagttgagccgtgtgttatccggagccctggacaacacacagctcatgtggtcacagtcctgcatttgaggggactcggggggacccaccagcaccatgcacacgatggctttacgccctctcttcagcagcactcacctggtggggcatttgtctagtctacagctggtgcaaacaacacactccgtggtacctggggcgcctgggcccaggcctttaagtgcctgagcctcggtttccccatagagaaaacggggacaccaaagaaggggactgaattatttatcactcaaatagggacacttgggaataaaaggagacactgaaaataactatataacttgtacaatatttaccgactgacagataggttctatttatgctggttaccttgtaaaagagttctggtcaaaaaacaattttcgggcctgacgtggtgactcacacctgtaattccagcactttgggaggccaaggtgggcagatcacctgaggtcaggagtttgagaccagcctgaccaacatggcgaaaccccatctctgctaaaaatacaaaaattagccgggtgtggcggcgggcacctctaatcccagctactcaggaggctgaggcaggagaattgcttgaacccgagaggcagaggttacactgggccgtgatcacgtcactgcactccagcctgggcgacagagcaagactccgtctgaaaaaaaaaaaaacaaaaaaaaacttttccaaagtaaatttttttctaaactgtgacatcggatggggtgaaagacagcaggcacccacagggctggcctggacgtctggtcacccaagcataagactggactcatgggcatcagaagagctgagcgaggcttggggctcccagagaagctgattattctcagtattgttatggccttcatccttgtgcccattactggtgagtttctggcaagtcaggcccgcaccttccagggagtcgaggccccttctaaggaggacccagatgactcaggggagaggaggctgccgggatcagttcccgctatgccctccctcagagctcggacccacagctgccagccacctccaagccgcgccagccctcaccttcagcctcctccaccatctcctcctcatttccgctcacgcccgacgcctccatctcctcatcctccaccacgggcgggaatgcagcctcctcgctggccgccgccggcgctttcttcttcttcctccgcgcgttcctctccttctcctggggcacagggaagcagcagatcaggactggggcctgggctgtcagctcggggactccccatgcctggggcctcgccgcaggtgcaaagggcagtgatcccggccatgtagcaatgagggtgaccgtccccctcacaccccacctcggcagccaagcgtgccagggtttatttttaccgggggctttattcttccattgagccccagatacactctgggtacaggctggcccctcagccaccctgacatccttcctgagcacgagagaacctgcctgacattgcccaggagtctcctagtcagagcgagtgaccacgcctcctggggacaccctgtcagcttcatcggcacacgtggagtgaatgaacacaggaagcttttccttgctatgcaagtctcacctgtccctgggggaacaggccagcctgggaagctcgcgtttcattccctgaacctttacagaacacctactgtgtgcccagctctgcataccagggctgtggggacacaaggcacggggtagacaaggtcctgcccttggaggctgccctgccgctggggagactggcaacgtgctcctcacacagaagcagcactcagaggatcagagggtcgcgtgggtgaaacaggatgggacaaggagcacaaggcaggggctcctctggacagaacagtctggaagagcttctgcaaggaagtgacatttgagccaagatttgacggcggagggaatgggccaggccaggctctggacgagagtggcaggtgcggggagtcacaggtgcaaaggccccagtgtggggaacatgccgggtgtgtccaggaatggaaagaagccctcatcgtcgggcctccactttccccgcaccgcaccctgctcctgggaaccccagctcctcacacacagagcccactcttcttcccccagcttaggcaccatcatcaaaccactcgtcttggtagctcactggggtgggtgtctctttgtccccacgctgagccaggcagaggctcagaaagcgtttgttgactgacttgctgagcaactgtgaaaggccagccttcgtgggcttgaacgcatagacagcagagagcaggggcatcgtggaggcagcatctcgaagtgactggggactcccagggggactggaaagacactggggggtgcccaccacagcctggtgtgacgggggggcggcagcctgatccctctggggttgctgagaaagaggtgggccctccgccacacctggaggtgcccgcagctctcagccaagagccctgtactgggttgaatggtgtccctcaaagttcacatcaacccggaacctcagaccttatttagaaacgggatcctgcatatgtcattagttaagatgatgccacactggagtggggtgggccctaaatccaacaggactgacagccttggaagaaaagggaaacacggattcagggacacgaaggccctgtggcagtggaggcacatgtggagagatgcagctacaagccaaagaatgtcacgaactgccagcagtcgctggaagacggaagaggctcccctgcagccttgaatgtgagcacagccctgtggacgctttggttccagacgtctagcctccagaattggaagagaatacatctctgttgtttgaagccaccggtctgtggtacttccttgcggcagccagggggaatcacacatccctctgcgctggtgcacccggattccaagaaaaagctgctgacgtccagaccacacagcctgctctcgggcaaatgccaggtgggccccgcccaccccagcccttcaccgtggccaggctggagctgggcctcatggaggggaggagagggggtctcgggctccaagccccagccacaggcagggagtgggatcacttcctgtcctgccttcttcctgagcaaacagggttcctctgagcacagccccttggaacgcagggaggaaaagggaaacgactgctcgtccgttagtcacagtttccgacaccaacagtcggccagagggccacagccctgcccctgccagtgcccacagggcccacagggatgcccagctctgcaaccccgcacacgtcctgggcccagtcccagccctgccccgaatcctgagcctctcccaggagagttcgagcctgtggcggcctgagaaagtggtggcatgtgggttctgcggctgcggccgagggctccccctgcttcccgaatctatttttggcagacagaggctcaggaaagactcagggctgggtgccctgagctgcccgggcggtggctgggacatgggagatgctcagagtctcgcagggaacaggggtctcctgtcggcctggtggtggcgcccagcatcctggagtgcaaggtgtctctgcggggggcggcgtggggtctctgaggcagtggacggggatggtgccaacaccctgaatccccacaaagctgggtctcagagagagtcccaggagttacagttaatccttacacacatggtccggcactgtgggatcaggaggtgtgtgtagaataggagatgctagtgatggcattaatcattatgcctgacgtttattaagcacctactatgcgccaagcggtttctggtattaatttactggacctgcacagctgctctgcaaatcagcgcatgccaccccctgcttcaaactctccaacacctggatacaatccccaagtcctccccctatccatatggccctgtgtgatccagccctggaccctgcctgcctctccaagctgctctcccctctcccctcctcagagactgtgctacaaacacactgccctccctgctcgctgccccagccacagggcctctacactggctgttcccctgcctggacacccttcccctagatatctgcataactcacttcctcacctccttcgggccttagctcagacatcagagaggtcttccctgatcactccatcattagctcatccctcccacccccaccatcaatcactttctactacattcttctcatagcatcttcagactccattctgaaattgagtgtgtgaacctgtctctcgcaccagctcctcaagggctgggatctttgttctctgctgtattcccaccatacctggaacagtgtctagcacagaacagacgctctgtaactatgtctttagatgaatgaacctgatagacagtgacaatggctcagagaggcaaagacacttgcccaagaccacacagctcatgagttgaggagctcagatttgaatgcaggccagcttcaaacatttcgtggctggaccatctctctgcaggcctgtgcagcctcaggtagaagagattaacagcagaaaacaaggcggggctgggccaaggctgaggcggacagagactgaggaacgtggaagccgagccccaggggcctgaattcacagatgggagaaaagggtaaccttcggccataaggagggggagggaaacctcgtagaagacactgatgccaagtgttacataactccgggacatgccccgcccgcccggccgccggatcctgcttcctgctgacgtcgcctgcggccacactcgggccagacctagtgcaaggcgggaggggacacccactgaccctctgcttccccactccttccttctctggccaagggtgacatgtcttcctgtactccagacagggctgggccagcagccagaggtggctgatactgcgttaggattcactgggatatgccctcctccctgggactgaaaggcacaggggaggggcaggaggtggaggtcaccaggttcagcggcacctctcctggtgagacctgcttgcttactgcagcgatggggagctcaccactacaccaagaacggctactgtcaagacggatggcctggcctgagccccacttcctgtagtgggtccctgcatctgctccgctttctctgcagcccgcgatatgagggtgctccttcaaggtcggccaggagcgagaaccaaccccacactcccaaatcactcattctcatccaggtcccaacctggatctcggggtcccctcctgtccacgcctccagagtcttcagcgtcaggggacagaagggccaccttctttatcagctttgactgtgtcattcggatcagaatcactttcatcgacactaggacgacccactttgagtccagccctggatgggggctgtgtctcagctcagaatccttcaatgcagcccccactccctccacggtccactaacgaagtgttagctccacagcccagcaggaaaaccccatccatgtctctgccctcagggcagctgccattgcttccctgggatacagcaggcgctgaatatggggctgctgaatggacagtgaggataatactgaatgcttattgagggctgaccaaggaccaggcaccaccctttacaaaaagaaacacacttgttcttcaacagccctacgactgggtcccattcttatccccattttacagaggtggaaactgaagcacggagaggtgaagcccagtatccttggacccagtcactaagcggcagagctggggtacaaagccaccagctccaaagccctgctctgcaccatccttctgggatgcctctttgaatgaatggatgaatgaatgaatgaatcaatcaatcgtgagtgtgccaccaccagcaccatcacagctctcactagcagagtgtctggggcatactaggccgcattcccagcactctgcaggcagccacccagtgtattcccataacagccctttgaagtgggttccattattgtccccatttcacagatggggaaactgaggcacagagagcacaggtcacttccccaaggccacacagctagtaggtggcagagcctacgttcaaactcagctctcctgggcccagtccctgctcccaacccatagcacactgtggctgtgcctgcacgcaccgttcaagaggcgccctcgtcagtgggatctctggctgcatgttcgtccacgccagcggcttcactggtggtcaccacactcaacagggtgccttaagcatggcccgtgccaccttggcccagtgctcatacctcccacaaatctcctagtctaataaaaccttccaactcaaaaaaaaaaaaagagggggcctcaggtggccctgagaagggggtagatggcatccagataaaataacaataaccacagcagtaagagtaactagggcacgtcgccctcccggagcgctgcccctctggcaggcactaaggacctcacaggtaatcactcgttcactcctcataggacctcttggataacaactgttattctcctaccttacagatggggaaactgaggcttagaaggctgaattcactgcccaaggtcacaggggtgcccaaatccacaagctgggccttgaccccagtctcgccctgggcctaatgggatggttcaccgtgctggggtctctggtcctccaagccactctcaggttttggagtctctaggggtacagtggggccacaccctgcggaagcctggaaagccaggctgtgtggcagcaggctgcagcggggggagacgtccatggtcgtggggtgagggggacaggcggagggagccccagagaggggaggcggggggaggagagagaaagtgaaaggacagctggggagaaagcaggaggccctttttgttcctggggagatgctcagggccaaagccctgcccccaagtcatcctggatgaaccacctcagactcctgacctggctgacagaatcaatggcccacaacatcccccggcccaggcccccttctgcgcccccaggctgctctggctcaggccctctttgccacaagggacttcagcaagtgttagggacggggttctgcacattcagccagatgcggtgccttcctccacacccaaccagaaggcccgaagcatccagaaggaaaaggcgctgcctgaagccctgagctctggggacaaatcccaggggccaatgtggagggcacgcggggcactgcttaactggaagtgatggggaggggcctccctgaggccagagggtggatctcagccctgaccacagggccgtgggaccgtggcccctcggtcccggagccaccagcggccgcgcgcacacatgactcactaagaacccactcgggagggtggaaggatgtccttaaattctgcacagtgcttgggcggagttcaaacagggggaggctatacctggtcctcccactgcaggctgtgtgacctcacagcctgctcaccctctctgggcctcagcaggttgcactgagggagcaattcagcatggcctgcccggaacccactgcacacactttacacccaggcacaaggcagcccgatgtcatggtttgggagtggcggggggaggagtagtcctgggggaggggagctatgcaacccctccctcagtgcttctgtatcgatgaggaaacacgcagcctagcgatgaagagcgtgggtgctgatctcataactgtgggtgcatatcgcaattcagtcgcacatgagcctggctaagcctcagtttccccagctccaaaaaggggacaatgcttggcaagtgtgtcaaagagggagaaaggagggaggaagggaaggaggaggaagggaaggagagagggaaggcagcagaggtctccccaaaatgctcctcaattcccagaaacagctgtggaagaagcggctgctcctcagaggccatttacacgctggcgaggcgagcctgcaccttctgtgcttgtggaggagggaagggtctcagcctcccgtggcctgcctcaagccctccaggatgctggggctgagacgtccgcccccgcccccccagacctgtccctccccaaccacggcagccctaaagctgtgaggtcaaatggggcaggggagccactcgctcaggacccatttgcctccgggtcctcattccaacgcgctgacagcccgaattcctggctgagtcagtctggtccaccgcgctccttcccccacaccgtgagacagggctgagggcccccagaggtgtctgtctgagaggagtggggtgcagggtgggggtggagggcagcctggcccggcccgtctccaaggcagggacactcatagcagcattgccgcctgcagccatctcggggtactcccgggcttgaacccccagaagctgagttctaacaaggcggcataatagcccctccctggcccatgcctcctggggtgcagagacatctcctgaggcagtctgggctcctctcccagcttcccagaggcgcggtgcagcgtgactgggggctcaccatcttcagcttgtgctgctgcaagatctcatcgaggttctgcctcttcttgtagttgaagtagaagttcttacactgcgacacagtcttggagcccaccatccgggcgatggccgaccagttgcggccgtgttccaggagacctgtctcaggagaggagggcagtgagaagaggccaggcccggcacgcagagggggcctgcatccatggcctgggcggcaaacgggcctggagcagaaacccagcctggggctccctgctcaggcccaggacctctggaagaagagacagtgatgggccacgtgtcccctagcggggaaggtactagagggtggcagtcctggcctctggggtctggtttctcagtcacttgactccaggccaggatgcatgggaaaggcctgggctggaggagccaaaagcgacaggtgaagtcccaccgaggccactgcgcgggagtctgggggcggagggctgtgaatatccagaacgcacagcctctgcccaggccccacctctcctgctgggcggagggcctggcctacgtgacccagccctgacactcgctcacagctgcaggcgaggcctcgggagacgggttgttttccggccacaccggcccagcgaaaggaagggacgtggtgagcaggggatgggagggtggaagtcagggtggggatgagctggggccaggagcctccaggcccaggttaactggggcacctccagggcccaaactccctaagggcacctaaaggcccactcaggactcggggcccaccaggcttggttgcgcagctggaatttgctcccaaaccccaacccgcacaaccaggaggttctctcagcctcacagacctcctgctgtgggaagagaccctccaggaatcggcagaaaaagctccctccatcactaggtctcaggccagaaccagagcatgccgccccccaggttctagtttcaaggccacaaacaccaggctcggcagaaacacagcccctgctgcaccggaggcagtgcctgggaagccaagcccccggtctcggcctgtctgcccggcgagctgcggcacacacaggcacaggccaggcagctctatatttatgcctgtgtctccagcggcgtgaccttgtgtggcccagccagtccatgcaggtagggcctgcccactttcccagggctgtgggagagacagggagtgctcctgacctaggggtctgtgcggcaagagggtgcccctccagggcagcaggccccaaggctgaatcacgtagctcgggacatggcagcctctctgagctggagctccacttgtaaggactttaatgaaggatttcccataatgaaggttttaaccattttccttgaataaaatcaagctgcaagccaagctccagctaaaattgttcagaggttggggagctgaggggcagccgtctgtgttggtattttcattcattcattcattcattcattcattcattcatccacccacccacccacccacgtgctggctgcctgcctgctacacacaaggctctaatgcaaataaaacaacagcagcagaaacatcaacacatcagcccgtggcacggctaactgacacacagagtttgcaaagcccttcaaagacttggttccgtctcatccttgctgtcatggctgtgaccattttcccatccccaggagggggaaatctcggttcagagggtcccgccaactcacccaagcttagaggaccagccaaggggggcaacgcgggcgtggggccccagacttcctgccctccgggtcctctggcccccgtggcgtgggggtggcactgactgacaggccacctgttcgcctgccgtggccctgggagccacgtggcctcacagcccgctcctcagggttcctcaaggacaggcgcagaaggggagggccggggcgtgggatcaagtggcacccggcccctgacctttccctccgcccgcgccagcagcagctgccacttccagaacctggcggacagggccgcgcgtttatttatatttccccagccggggccaagagagcccaggcaaacacaccgggccagagggatcacagacccggcacccgggtgggagagggcgagagggggcgggtctcccatctgggcctgctgggtggggtgggcatggagagctcagggggtggggtgagggtggcccaacaacactggggaggttgacatttccaaactcagtcaataaataaggaggtagctaggagcctggctgggggctggggaccctaattaactccgatcatgggggcagtgggagtgggttgagggcagaggagaggggatggaggtgggggtgggggtcacccagcccttcctgaaaacatacggctcccaaaggagctgggcagagtcatccaggcgcctggccagagctcgctagcagtcttggccagcccttctgctctccggcctcagtttccttaactgccgtgtgaggagccagagtgggtgtcccattagtgccggccagggctgcggggtaggggcaggctggcactggcttcctctggttcctgttctgggaagcccaggcagaggctgccaggcacggagagaaagactttctaccctaccgtgccttggagaccaccccgccagacccagcttgaagcccccgtccacttggagagaccccctgtgcacacagcatcacagaccttcccaggcacagatccaggtcccacccctgcttccaggagagcttcagcccagcagggagagagaggagagggcatgggggaaaggatgggctgggacccccatccactccaggggcccagaactccgactccccagctgcccagcctcaaatcccagatggccacgttgcggtccctgtccctgcacccgcagtcccccatcccctccccaggaccactcactcacatcctctcattcgcgtctccccctcggccaagttttccggaaacatagggctgggaagatgccccagggagcgggccgaagtgggccggcaggctgggcggccgcggtcggctctgcgaggctgctggttggcgtctgctggcggctcagctcagcctcacatccttctccgtcccacggtgagggagggagggagggagggagggagggagcgagggagggagggacgcggcgggcggaggctggctcgagaggggcgggcgggaggcagctcctcacaagtccgcctgcctgtggtggcccggggctcctccagcggccgctgccacctctgacgccgtccccaagccgctgtgggcgcgcgaggtgcccttccccgagggtggtgggtggcgggaagttgtcagtggtgcgtgtgggatgcccctgggccaggtatcaccggggcgcagcgtgccgagctcctccagcaccaatgtgcccagtgcggacgctcagcgagcaatgccggccagagcccacagacccccgggccgggcaaaatccaaggacccaggcccagcagggcagccgtgtcccccgcagccgggctcagctctgatcttcttgctgcctgacccagcgagacgcggcaggactgaatgtgacctccagacggaggctcgcggcgggcgggcaggcgggcgggggagcgtggcagaggcccaggttcacaaggggcgggccaacttggcactggctccccctccctctctccccatccgcggcggtggcggcgtcagcagtggtaagaacagatgagggttccagaaaaacagagcttctccacccccggcagacagggagcaaacagcttcttccgccatcatcccccgccgcccgtccccccaccctccgtgtcagttccacctgagctctgccccctgcctggcctgatgctgccgaggctgaccgagccctctgtcggggactgtgggtgggcagggctagcctcgcattccggagggatcccgggatttgaggagcctttgcagggtgcacatgagaccgccaaccatttaggggagggggaagggtttggggatttggggtccccaaagagccctctgctgctgggggggtctcgggaccacagctgcccctttcgtcctcctccgagagcccctgcagccgtgaaggaacactgtgggaaatgccggggagccacccagaaggttgaaagttaactgagctgaactttggatcctagattcaggtcacgaccgacttccctgactctgggatcattaacctgcttttccctttaactcccagcccttccatcctgccccctaaaaatctggggagcagaaggcgtctctggaatgtccctgcacccccagccctcgtcctggggcacgatgccaggggagggcaacaaacctcaaccacatcagggatctgggcctctccacctgagtcctgccctctgccctctgcaggggaggtctcagtgcacttttaaggatgccaaccccgtgaaatcactcctctgcttaaaatcttccagtgaccacatgaagctcttggaataaaatccaaaggccctagcacggcccaggtgacccttaggagccagctccatgaacccgcccagcctctctctgggtcactcgtgtgtgccccagggcctttgcaccagctgctcctgctgcctccacgggttttctcacagatgtgccttgtcttccctctggtcttggctcaagtgatggctcctcagagaagccttccttgcccgcccctccaaagtgacccccccccgtcgccctgccatcccagggtttgatcatcttcatagctttcaccgcctctgaaattagctccctcgtcccactgctcatcggcaggtgtccggggcctgctgagcaccctgggcatctctgccacccgtctgggtccctggtaaggagcttgcaaaggaagagggggctgtgcgtttagctctgcagggggccccgaaccctcccaaaagaggctggggtatcccccttgacatccaggcacacgcccccaacactctgtgccagggcggagatggcagattctgccaccatgccctgtggtctggattccccgaccccacttctaatttctaaggaaggagtttcgttctgaagagtcaggaggcaggaactaggaagtgaaattgaccaagacaggaagtccagccaggaggtctgagtcacagacgccgagtggagagccaggcgcaggggcccggcggccacgggagtgggtgcttggggccccgctgggctaatcctcctctgggcacccatggggcagcgtcccacatgccatccgcgggcccatgacgagctgttcttgtgggggccaggactcagcctcctcggctcaggtgctctggccctcagggaggcctgtgctgccgctcagatgcctccaagctgcttttctccaagggtctgcaaacctgcatccacagctaggactccgaggggaccacaccaccgcccacctgcatctggggatgttgcagctgttttctctggaagtcagcccccaaccctggaaacacactcgctctccccaccccagccagtcacctccagccttgacgtttcccaccccttccatgaagactcacaggctgcctgccagaggggtgcatcgaccaccgccccccacctgccattttccccgagaaactcagcatgctctgcctaaaaccctatcaaagttgggaggaaaagaacccagccgtcttgggcctgagtcatgccacttcctcatttcagaaaccccaagccctggcggggggggggttccacagggacggtgcctccgcattgacacccttgacaggccgggcactcctgcgtgtcttgtcaggacttcccgaactcctgccatcctgaaatcctatcaggatgttggctggataacatcacacctggacttgcacctccccactcttttctctccatctactctttcaaaaatcagcctcgctatctgccttagcctccgcatcagcaattatacccgtaaatcataggtacgatgtgaaaaagctacgtcttctcccagctctcaaaaaaacccagactcattaagatgaaataaagtcacctgcatacgacctggcgctgtctcgcctaccatttccggaagtgccacgttacacctttcaatgtcacgttttcctacagagcagagcaaagttggaagccagcctggggggtcagacagaccaccccatgccctgtgtccaccgcagtgggctgggtgagcactggctctccctctggccttggtcttctcctgtgcaaagcagaagtcgtgtgtatgcgtgcgtgtgtacacacgcgtgtggagggcctgccttgttcgtgagcaccagccacgccacgtgacgacaggcatcattactaccgcatcgaccgccaggtgctccttccctgagtcaggagccatgtggatgcggattcatgggtctcccctaggagggaaggggggcttgttgatgcctgatttcatcttcaagggtgctgacaggagcaagagtgtggtccagaccctgcccctgtgtctggctgtaccccaagttcctgcagaaaccccaattttttcctccctccaaaccatcacaacagactgtttctcacatatccggccgggaggccaaccagccccagacatgcaccctccctagtggtctctctccagaccacacgtggtgacagtctccttggacgcgagccccgaggcaccgcaccgtccctgcctggtataccacccctcctgagtcacacagctcgagtgtcgcctcctgctgggccctgacggacagctgcaccaggaagtagccgggcagacccaaacccaggagcagcagcactgcctaccggcccgcccaccccactgtaagctctggcagctttgtgcggcagagcacacaggcgctcctcttttggggggcccatggtgggcacagcccaaggctttcccagtggacatgtagtggaggaggtcctgctctccaggctccaggctgggggctcacccctccccttcccatgccttagacgcttcatctataaaagcccgtcaggccagcccatgtgcacagcaatgggtggttcctgcctcgctcctgtgagaagtggcaaggccactagacaaggcagctggagtcctgggggaggcctctggggtctgcccgggcttactgggagccaccagggcctggtcttgcacatcctcccactgttggccgctccctggagattgggaaggactggcagcccggaggcgggccagagccaactcccggtctagaatggtgtgacaatggtgtgaccgggagcctcccaaccccctccacagcaggttctctgcccgccagagaagagggctggggcctggaggagctgccagcagagcctcgggcctctcgcacagctgggtcaggcttccaagccaggccaggctgacctttcccaggggaaccgagtccctcatcccagccctgctcctgccctgcccctccttccccacttggcgctgggcccgagggcaggcggccagctccccggagctgcccggttcctggggaagctgcctcctgaacattctcggtcctcaggcagcacaagccccagggcaggcagccacagccgcatgcacacaagaagggaggttgctcacttgcccaccagaaaccctatggccatcatgtccccagcccctccccagtggcctcccacgctctagagtaatagctacactccatcccatgctggcaaggccaggctcccggtggcccctctaccttctgggattcaaccacttctcatggggccacactgcccctgccatggggcctttgcacatgcctgtcctgcctttgttacctggtcaacaggttggcccatggactaacctgttcagctctcatgccaaccccattcctactctgcaagtagagtgcctgggttcaaatcccagctctaccacttcacagctgtgtgaccctaggctgctcactaagcctctctaggcctcggtttcctcatttgaataacagaagtattaacagcacctgcctcctagtcaggttggtagagataaagtgacttcatacacacaaagcttccagcagtgcccagcacgcaggatgggctccacggtgttactgggtgatattcactattatttcgtgctctgggtgtcggccccttcctcggggtagccctctgactggtggcccccagcaccatggaagttcctccagttgtcactgtacatttgcttggcaggtgacttacctccgacccccatcgccggggcgaagacagaggtggcgggggccgaggccccaaagtgtaggtacctgctcagggtcagactctgcaggaggcacagctgggacccaaacctagggagcagggtctggagactgcgccctaagctagcggcctgccatttctgagtgcctactgtataccaaggactgttcctatgtggctcgctccgtctttaaagtgcccctgggaggtagcatccctgcctcatctgagagaacgatggtaactgagggtgaaacagatgggccaggccaaggtcagggggctaaggagctgcttgtagctacaaagtgatggggaggtcggtatgccccgggcagcactgccctcagctcttctgtgtactttcaccaaaaccccaggaaggtgggtgtgctgggttggagagcatccccccaacattttgtgtccaccagaacctatgaatgtgaccttatttggaaaaaggatgtttgcagatgtgatcaagtcaacgtggggtcatactggattggggtgggtccttgtaagaagaggaaaatgtggacagagacacgcagggagaaaggcacacaaagacaaaggcagagcctggagggatgtggtcatgagccagggactgccaaggctgcaggcaggcgccaggggctgggggaggcaaggcaggctcctccccagagcctctggagggaatgcagcctcttggatgccttcaacttggacttctggcctccagaacagtgagagaatacatttattttaagccacccagttcatgaccctttattatggcagccacaggaaacatacagtgggcgctccttgaatcccactgtacagatgaagaaactgaggcacagagaggttggctgacttgcctgaggtcacacagctgaaacatccagggggttgagacctggtttctccctaggaatggggcccctctgctgctcatcctccagggccatgctactaaagtcttccagaggcttcaggcaggctggggtccgaaggccctggggaaacctggctgcttacctgcccaggctccccgagggaggggtggggctggctcattcctgagtgcccctgccacacagagagtgaggcactatgttgctgaaatgatgggtaaaggatgggcagagaccatctgcctcagcaatagccgcttctccagtcccttttcctaactcttggttttctgggcgggggctccagaacgttcctagcttctccaccccgaccccctatggaggagttgctggggcctgccagcacctgtctccccgccccacccccgctccctcctgccatcgcctggaacacacagccattagcagccaccctgagcagtaattgtccagattgctgtaattcacggcagacgaacatgctgctgctcacgacattattacaaatgtcactgagcagggcctccgcgtgcacggcccccaggggacgctcactgccgtctccatgggcaggacccaggatgagctcactgtcatcactgaggacccaaccttgagatggtgggacacgggctcctctccgccggtgagtcatccccagccgtcctcccagcctccggatctgcccttccagaaggcaaacagagggcaggcactgtcttcccagttctcaggcaatgggcggtgggggcgggggtggtcaccggtgaggaggtggtagtgacaacacgagacacgagaagggatggagaggcggtgggaccctgggctgaccgtttggggatgtccacgcggagtcctccgatgggtgggtgctctgggaaatctcccagccaacaggctgagatcccagggactcacctgtgattaaaaatctcacacaattttacacaaatgctcacagcagcactcttcacaacagccacatggaaacaacccacacatcccccaagagatgaacgaccgacaaaatgtggtccgtgcaggtgagggaatattattcagccgtacaaagctactcagatgaacctcagaaccatcatgctcccagaaaggagccagacacaaaaggccacaaactgtaggattccattcattggaaacgcccagaacaggccaatccacagagacagagagtgcattagtggctgccaggggctggtagggctggggcggggccctgggagggactgctaatgggtatgggatttccatctggggtgagaaaaagttctggaactaggcagtggtgagggttgcacaccaatgcagatgtacttcatgccactgagatgttcactttccagtggttagaatgctgagcttcgtgccatgtgtatcatctcaaaattaaataaaaggcggcgggaatcacacaatttcaataaagcttcttttgcagcctataatgaaatacatgccagaaaccaccaagtggacattaaagacagagaaacaacaatgtggcctctctgggggctgacagcagccccaggccctaccagctggatacagtgcccaggccctaccagctggatacagtgcccaggccccgctggcatgcctctcactcaccacacacagagcctgacctgcagcggcaggcaggccctccttcctgaatggtgcgagggtctctctgggtccaggttcacctcagcctggggggcggagggcagactgcccccggaggagctctgagggcgaggggcagggtcccggggtgagggcgggggctgtgggggtcttctcagggctgtggggaccctcagcaccccccacaactacagtggaggacggggccgggcccaggagccccgtgatccaggctgttctcagatacacctgcccttatgtgccaagagcgtttgctataaagggcctttgttccctccataagtcacgacctggagctttctgcacaaagaaaccgcacgtcacagacagcctcgactccagcagggccacgggaccaagcacgggacagggacggggagtgggggcctgggcctgctcccagccccacacaccagctccggaacccgtggcactccttggcctctgcttcctggctccttgcccacaaacagggacatgggcggggacaggagcaggccccacctcttagataaccgagagtgagcgtgccgtgggagccaggtgctgccccggcctcagcagtgctgccagtgatgcgccagctccgacagcccctgccccaggccaggcacggccgagggagggaggagattcgctcccactcagcccaccatgggccctcacacagggttatctgattccgcacagccaacctagacgaccctcccactcaacagacgggcaaaccgaggcccagaggcaggtcactgtgctgggaagtaaagatcttggccaggagacagcacagctgagaggggatccggcttaggaggcactggaccccagcccccacggtgctgcacatcacaaggccatctgctcgggatggcttctgctgccagcaccaatgcctgctggctccctgccgtgtgagccactcccacgactgtccccaacggcctgggtgtccccatccactccagaacccgtcacccagattggggtgctcaaacctgagacaggtttccaaagccccagcacacttgagcccaggataggacctttggggctctaagggctggatgaacgccctgcaggtctccctgaccccaggactctaccgagatggccgccggcaagctctgactgtcccgagatacccaggtgtgctgccactgctctgtccccaaggcccagaggtgctggccacagaggtcacccagaagccactcgctgactacatgcacagcacaagctgtgtctctctgagctgcgccctcaagtcacaaagacaagcctgacagcgcagctgcacagacccattttctggaaggtaaaactgaggctccagggtgacaaacctgagaacagcccagaaccagaacctcaccagaggcctcaccacagcccctggctcaaggccaaatgtgtcaacaccctccccagcacgtgagcttcaggcgccctggatgcaaaccaacaaggcttaaagccgccacacacccctcacctttcttggctgtttccatttcttcttctgtccagcgagaactctcattcagctccatggaggctgaaaagaagatgccaggttattggcaggagccgggagaggaggcactttgccttctgcccttttctctcctttgagccagggagggagtagaccaggccttgacggtgtcaccgcacggctctgaaccccgtgggaaggccacatttcagacgcccctccccagccagtacccaccgtggcacctgactccctgagcctttatgctgggctggagctgtgctgggcagtcccacgtgccgttggtcggggccaacctccacacaagccgctgaagtcggggcacctgcgatcaccccattttatagaaggggacactgaagcagtcaagggccttgaccatgactgcctctgcctgcactctgttgggaaaggggtcacctggtgacgtggcgacagtgggacacaagcttcaggtgggccgggacctcatctgaccgaggaccctctcggagcccagctcttctattactgtggggctgtcccatcacggcaggatgcttagcaaccctggactctgcacgctggactccagcaaccctactccaattgtgaccatcaaaactgttcacagacactgcctggcgtcccctagtgggggagtaaaatcgcccatggcggagaagccctgctccagagggaatgttcatacccccactcatccaggacaaggaggggcttctggtgttactgggaagggacacaacctggccttggggttggctggaggtggctgcatctctgcagtggcactatttttgggtctgtctgccgagctcctctggatgtgagccctggcccttcctttccagttgcttaagacccatgagtggggtgggtgcgagggacgtcagctccatggactcagcacctggaactgcgccagggggagtatgtgtccaacagaggctggctgaggagtggcggaaggttccagcagaagaggggagacggcccccacccccatgggcagccccatcagccccgacaggccagagccaccccagcctcccccatctctgcagccacagcctgggcctctctgggacctcatcgatgctcccattcctccccacaggactcccagaggaagcctacagaagccaggggtgccaggggtgctgagggtgcccagtgccagaagagacatggaaggcctaggagtgtgttttccaccctgcggctgagcccccagcatcagccttgggtccgagaggactatccccagagatcaggcaggaagaaagccctttcaccctgggcctccaagtacaccgccaccaagaggcagctggaaaatatctgcaggagctgcataggctctgtggccaatggggctgagttctaaccccagctacaatgaaatttttagagagggaacgtttcctctctgagcttcgagtgggccatttatgaaataggtccaaactacatcccacgagaagaagagacaggtgcatgacccggaccccaggggacggtgggggtctgtgggagatgaagcagcatctccaccctgagaatgagccctggcaggcggggcttcggcctgagcgcttgggcccctgggtgggttcccgcagtggctggagggctggaccctaacagctaaacaaagtagagacaacagacgcacaccgctgccccctgcggcgaatcttgggaactgccactcacatcatctcatttttttctactttctgggagggtagtgagggatgaacacccttctcaacagaaggggaaactgaggcccacggaagtgaaggtacaaaaccagatgcctaccagggtagaggctgggtggggacaagtagagcccatgacattctaagaaggagtggtggttactcggctcccaacaacagccacctcatgggaacctgggccaagcgtggccagatcttctgttttaaaaacgacaaccaaaaaatccggaactggtcactgggaattttttgtgacatctccctgctctgaaatcactgtggttgaagccactgaactcttcctacaccccaggcactgttctaggtgcttctcacatagcaagtgactacaactgtccccccacgttagaggtaaccaccgattcctcccactgagaacatgaggaccctgaggcacagagaggttcaggaattcatgctgggccacacagcacatccagtaggtagcgctgggatttgactccaaccatgacttacaccaaccccttggctgttgccaattaactcaaattgcacgaaactttcatatgagcgcaacccgccgtgtctccagccccttccccacccgcatccctggcccccagctcacccagctcggcgctctgctggggggtgatggcctcctcgctgttggcctcattagccattgagcgggtgatgcggcctttgcgtcttccctggctgttggcagttttgcggcctttggaggccacagcctccttctcgtcgttgtcctcccctgaggtgtcgtctgtcttctccctacaggccagagaggggagataggatggcttcacccgagccgggaaatcaaacagccactggaggagactgtttctttagctggatttgcactggctgccagccatggcactaatcggacgctaggaaagagggggagaggcctgaggtgagggtggccaggggcaagtctgcaggggctccatgttcaccagaagtgggagtacagctggcaggacaacaccatgctatttctcaaaagggagttgcggccaggtgtgctgggtcacacctgtaatctcagcactttgggaggccgaagttggaggactgcttgagcccaggagtttaagaccagcctgggcaacacagcaagactccatctctacaaaagaaaaagatcagaaaattagccaggcgtggtggcatatgctgatggtcccagctacttgggaagctaaggtagggggatctcttgagcctgggaggtcgaggctgcagtgagccatgattataccactgcactccagcctgggtgacagaacaagaccctgtctcaaaaaaaaaaaaaagaaaaagaaaggatgggggtgtaacctgggctatcaacttaattcaccaataaggccatgtggacaggtagttaattggctggctattttattccccaaatgggaggtactgggagctttcctgcaaggctactttcttctgggctggtggttatctgcaagaccattttatgcaccaaatagagagatactgtctgcaagactatttggtgaactaaatgggggcgtgggctggcagcaatttatagggccattttattcgccacagaggagctatttccagaggggctctataagaggcaatacattggccttcagtattatcaagggccgggcatcatcttagacattggcaggaggaaactctcttgctggttttatgcaggcctagcctgcaggcctagctgtggtgtgtgggggtgctcacaacctcgatacccgagctggggctctcgcagaagtgactggggagagttttactgcgggaggctcagattgatcacctctgccttcccattcatcttcctgaaaggcccttgctggaagcgtctgggagacggggtgaggaagccagatgttctctgaagccaaattcctgagcccattacaggtacctggcgctaagtcgtgccgcccccctttctccagctggctgcactcctgcagcccctggcaggcacaggaggctgtcacggcccccgcggtgaggctgtgccttgatctgcaagaactcacactgccatcgatgattctaaaggtgacagcagccgcctgcacacctagtccttccaggagggcctctgatccccctttcccccttcctggcgcctcaggaggaaagagcgggaggaagcagggaggcagagagttccaaagtcattgcctggatttattagctcaggagtggagctcaaatgagctatcagtctctaaagtctccagagggttggagaaagaaagcgagggcggaggagaggggggagccagggaggaggagtagggcgatgggtgggcttccggaaggggggctgtcaggggcaaacgagcagaaagccctcccccctgctcacaggcaattggtgggcaccccacccgtctctacaaagggtcccccagaaccgtgtgccacccgggttgggtcagcggccgggccctgcaggggacagcaggctgccttacttgaggaggtcttccttgtcgttctccacctccggcttctcctcctccttctccgcctccttttccttctccttctcatctttctcctcctggctgctgcggggcatgggctgctgctgctgctgctgctgctgctgctgctgctgttgttgctgctgctgtcagaccccgggggagggcagaggggagtggggagggaagaaaaccgtgaacaggtgaatctctgcacctgggctcagcctgagctgggggaggaggaggaaaacccgtggagtccacccagaagaggtcataaacaaccgggaagccaggccccactggcatgagatggggagaggcacggcctggggtcttgccgccctaggggcctggggaggcggagtcggggtgaggggcaggaagcattggtgtcagaagtgctggcttcaattcctgccctttccacacagtggctgtgtgagcttggatgagggtcttaacctctctgtgccgactccttcgccttgacaatgggggtattcagcatgcctgtgcctcagctgagggctgggaggttgaaatgagagaatcctcaccatgcttacatccgcatctggcccggatatttaagaggggcagatgtgatctgggttgagagaggtgccctggtgagcctcggcaggggtgcctgagcatctgggaagctggggacacacccctgatgccccagccctgccctgcccccgacagagctcaggccacctctctaagcctcggtctccgagtctgtaaaacggggaggtggggggatgcccctgattccccagagcccaggaaggccccaggcctgcgtggaggtggctgctctgctgcctgggcctggtctccctcgcatgccagcaccccagggggacagaacaagcccattttacagagcagatcagagaggctgggagccaagccagcctccttacttgggcctcttcctgtcatctgcctccccgacctgtcccagccactctgggcctaccgcccctcccctcaccgagatagaggagggagtgtgagctcctcctggcaccgcctcccgatttcctgtcatcccgcctgatttcttttaaagcacacactgattttcttggacaccccaaggtcctccctgcaggcagctgccaaaccagaccatctttccatccctctgagccaagcgaaataaaaataaaccccaaagccttttaatgtgtaccaggggcacagtcacggcaatgtttcaaaccagggagcaagaactccaagcagatggaagaggagggatcggggaggtgagagagactcccttctcttgcctttccttcctgccaggaacaggtgcctgacccgcacacaacgctctctccagcctcttttcatttaggatggggcagaaaaacagagcaagtgtctgactgctgcaggcaaccgtgggctccctgaggctgctgccaggtccagggcagagcctcgggcctgcatctgcctcttttccccaggaatcccttgccaccatgttctgtaagaggagccaggaaggggcagagttgcccgacctggaacagaccccccggcccccaggttgctgctgattccccaacaggtgcccggcatcctgggatcaacctgttctccctctcctgacctcgaaccctcaaacgtaacgtttaaacagccggcaggtgaagcctcttttggaggtggaagctggggcagggagggtttttttggcttgttcctacacagtatcctttctgtccacatttgcccgatgtgggcagaggtagggacccggggagggaggagtgatgtggctggctggggagagagccttggcccctgggctgcccggcatggatgccgtctccccgggtcagatgtccctggcaacagcccagggccagagtctgggcagggccggggcttttgaatcacacgggcttggtgtctcctgagaccacattcagctacgtctgtgccaagaagtccccacctgggctgtggcgtccctcccgatgggagcagcagccacggagcctccttcccagagcatctgcccatcagcccctgcacctaggctggtgggggctccatgaccccctggggcctcacccatggaccaacgaatcaggctaatgtctgctccggcatggccagtaaatgcagctccacacccatcaggccgcaggcaggggccagttgggagagggatgcatctgggccaggccctgagctacgagccttccccaccgcagctctcctccaagtcctcagaaaagccccaaggaagaagaggctggtacagaggagaaaatccccacagatccccgagagctgactatgtgcccagcactgtgctgtccattttctatgggccggctcctggcccctctgaagtcctgatggagatgaaaacgccacgagtaacacccctgcaccatgccaagtgctttgcaaacactatcccagcctcagaaacaggagagcagtgatcactggtcacattctgcagaggaggaaacaggctcagagaggcaaagcttcgaggtctcggagcaaaggctgacggcccagagtgtgggggatggggccctgctgcccccagagcccccgctgagagtctcagccaacccccagccaggatctacagtttgtgttctgcagacttgccagcacgccccatctacctatccctacctgcctcccactccagactctacaagccccgccagggcctgcccacaaccccctcgctcctggaacgtcaccccctatgtctccatattcgatcgctcatggcaccacgtgcctggctccgtcccacatggtctcccctacccacccacctgtccatcttacagaacaggaaactgaggcaccgagtgcaatcctggcaccaagccttgccgcctcctcttccctgacatgttaacaagcccccagggcaggggtgccttccaccctcaccctctggttggagtgggtgcagcaacacccactagcacagcaccttctgggccaccctgcagccaaggcctagggccctgtgcacaggctcctcacttcctgtggcctcaacatctcctgtgggagaggcatccctgcagcccacgctgagtgagtccggtgggggaagatgaaaaggaggaatagcagagcagccctggccttaaaatatgctttccagtgggacagaccccggcagccttaatgatgaacatctgcagggtctcgcagtggccacccgggaggccgagggactgattgagggccgctcatactcgctgctgggagattatgcagggagagggaggtcccagctcacaactccccctgaggagctggggggacccggcagccggctcagcccccaaagccttctatgttttagggcagcaagtgcagcagccgacactggcgaggctgggctgctgggtcttgggcctgtccatagagcggcagaactgcacctgctgggcttcccgggccactgggggccatggttctcaaggtcccatgacattggctgcacactcagatctcgtggggagccctgcgaagtcctgatgcccaggccgcaccccacaccaatgacatccaaatctctgggcggagacccaggcgttcgtatgttaaattccaggttatcccgatgggcagccagatttgagaaccagtgctttaccagggactggcaaacgttttctgtaagggccagaggataagtatgccgtctctgtcaacccccttctcaattctgccactgtcttgtgaaagcggcccttatatcaacaaaagggcacggctgtgtgccaataaaactttatttacaaaagcaggtggtgggccggatttggcctgtgggctttcgttagagcactctgctccaggccagtgttacccacacctgcaggtgcacacacatcccctgccaattcccactcagtcggtctggggtggggcctgggactctgcatttctaacctgcgccaggagaagctgccacggctggcctcagatcccactgaggagtgaggccttcaagaatccttgtctcacaaggcacataaaggactctgtgcagcagaaaacgcctgtgggcaccattccctcaacgtgaggggactgaaaggagaatcagaaagaactagaagccagctccactatctcaaaggaccccgccctcgtggtggagggctacctctgcctttcagatgtgccactggtcaggctgacagtgggtttgtgccctgtgcgtggtcagaaacatccccccaaaccacagtacaactctgtgacaaaccctactggatctatggttagccagagccactggcccaaagccccaagagacacctgcccccagatctggacactgaacccataaccctcagcctgccagacaagcagcacatgactgggcctgtgcagaagccccagactgggggctatgcagaaaaatatcttaattaaaaacagcaaaagctcgctgagcacatttgatgaggccttcttctcctaatcacttcctacctgttatttgaatcctcccaacaactggtatcatcccagttttatggatgagaatgcaaagacagagggagtttaagtaactcatccaaggtcacacagcatttcctagaaggtcctacagccaggtgccctacctccgccctgggctgggggttcacagcctcctccctatgcccatttaaaccaaatgatgccattgcctgattctttccttccgccagcataacctgaacccccaaggggcacaccagccacagaaagatgtggcccccaactgtatggagcttgtatttaggttgacaaagacaggccagatggaggcgccggtgacgaggacacattcaaaaggcacattcatgatgcagatgaggcagcaaggcgtgctgacatgcagggcgagggaaggggctttggcagagcaggaggcctctgcggcatggcaatgggaaaatggcccctgtgcctaccaagtggcactttggggcatggctggagggcctggccagggctaacacccatgctcagaaatacaggaggcattctgagggcggtgggagcccccggggacctttctcaaaaggtgcaggggtcgcagggagtcacatgacccaccccatgttaaagagcaatccaatagcaggtcgcaggaaggaagacggtggattccgggaatgagaggagacagtccagtgagaaggtgctgcgaccacccacgtaggggttgatgagatttaattctcagatgctaagtccttacaaatgtgtcaggagaacttcccaaaacccagcaacaccgtctgtggctcaatctcatgcactcattcaacaaacacttcactgagcatctaccatgtgccaggtgcccctgagagggcgcatcctcatgacaccttccacctcctggcagtgtagggatggggattccaggagcctggggttggtgtggaaagtggggccaggggtcagagccgaggcagaacagggttccctgttgctggcagctcttccctaacacctgctctctgtccctcggattcagtctcctgtccttgctggggaaaatgcagtcaggggaggccatctcagtgcgtttaagggttgtctttttataagatataccaaggcgtggcggggcgcggtggctcacgcctgtaatcccagcactttgggaggccgaggccggcggatcatgaggtcaggaaatcgagaccatcctggctaacacggtgaaaccccatctctactaaaaatacaaacaattagctgggcttggtggcgggcgcctgtagtcccagctactcaggaggctgaggcaggagaatggtgtgaacccgggaggcggagcttgcagtgagccaagatcgcgccactgcactgcagcctgggtgacagagtgagactctgtctcaaacaaaaataaataaaaaaagatataccaaggcgtgctggagccagtggctaccagctcatggccattattaaaaatggaaacacttaaccttacaattaaagaaattatggcctggcaaggtaactcacacttgtaatctcagtgctttgggagggccaggcaggaggattgtctagggctcggagttcagaccagcctgggcaacacagtgagaccctgtcactacaaattagctggtggtgctaattttaattaggtggtgcatccctgtagtcccagctactcaggaggctaaggtgggaggaaagcttaaacctgggagatcaaggctgcagcgagcttcaactgcaccactgcactctagcctgggtgacagagcgagactccatctctaaaaaaataataaattttttttaaagaaagaaagcgaaggttacaagcactccaagggcattgcttcctgatcatctggctacatggagctacgaagtcatccgtgccgtggaggtgacttccgccaactccatgcacagggtgagaacaggataagacagcctggtgctaggggcatctttccccagttccaagtcagcggcagcacgttgtcacgtggcactgggcacggtgagaggatttatttacaccatggcaaccggcacatgctacaaacgcagcttccccctacagaaagctggttgttaaacatttaccagcactctacggcagaaagatgcgtgtcgacagaacgtgagcaacatttaacacgcacatggaagcctgttccgcctgtacagatgtgtgctgtgccagccgaggctctgttgtaaatcctaattcagatcccgacccgcaactcggcatcaaatccacagtccctgctcctgctctgaggccaggattcctggccctggcccacctccctcagggcagctctccccatgcccaccacctgtctcctggaagatggcccgcatgttcctgcttcagggcctttgcacgtgctgtgcccacggcctggggtgctcccccgacttctgcctggccagtcccttcttatcactcaggtctgagcccaagggacacctcctcagagaagccttgcggccagctccctataaaagctgccctcctgcccagcagtggcctcctgaccctggcttacatgtttgcccttcaacactctctcaaattgccatgctgattgacttacgcatggtccaagtcccccatgggtgtcagctccagggaccttgtttgcccttttttttggaggcttgcacatggtccaagttccccatgggtgtcagctccagggaccttgtttgcccttttttttggacgcagggtcttgctctgttgcccaggctgaggtgcacagtggcatgatcacggctcactgcagcctccactttctgggctcaagcagtgcttccacctcagcctcccaagaagctcggaccacagcagcaagccacctcacccggctaattttttaatttttttgtagagatggggtctcaccatgttgccctggctggtcttgaactcctgggctcaagcgatccacctacctcagcctcccaaagtgctgggattacaggcatgagccaccgcaccggggtgaccttgtttgtcttgtccacgagggaatcacctagaatgacatccctgcagaacagactcaaacaccacccatcccccagggacaacctgccgcctgtgagcctgccagggcccctccctcagtgcctccagctgccacagacaccaaggctgctgttctgggaactacttcctgactccagcagcccagcttgagatgtcccccaggccccctcgatcctgaccgatctgctgcctggggagcgctcacattttccacctccttctgcctctctgatgcgatcgcccctgcactgcatcctggcccatgcaaaggccatgttggtcttttcctcaacctgcagcccggtctgctccatccctgggctccggcccactcaccagctgccttccctgggagcaacatccctgactgcaggacgtggggagcccccaactgtctccccacctagcacaaagctgggcaggaaaccagagacatctgctcacttcaaccctaaaactgcacccaatcctgcccagcccagctggccctgactggagaggacccagccacctcctctggcaggcctgggaaagtcggcaccaccggaaggctgtgggcccatcctggcccagccccaagcaggcagcaggtttgaaacaagatacaagccctcggcctgggagctgaaacacagcctggggtgatctggcccgccctgccaccggtccccaccatcaagtgacttcagcacctagggcaggcagctagccctgaataccaacacccaccgcacagcggctgcccctccccagggaccaagcctggctgctcctgccctggaacagccttcccggtcatactgttccctgtgcaaactgtccgagtgccacagcaaggggaacaaggtcaccagtccctccgcaaagagctgggagaggacagacggaggaggcaggggacagggggctgtagtgggagggaggagagagaaagggagaaaggtgggggaggagcagagacctggaggaggaagggtgagaggagagacccagggacagggtgaggaggggagggggcgggggaggaggaagaggagagatgggggagagagagaaggggagagagagagagagagctagagacagagttaaaagacttagatgggggaaagagagagagacgggaaagcacatgcagagaaacagacgagacgtggacacagagataaagacacagagaaatagaaagagggaggaagacatgggaagagaaacagacgtagccacccgtgtgcgcgcatacacacacagagagagagagagagagagaaacctagaaaaatgcaggagattcagagccaggggcttgggcagagcagacccagagggacagagatggggaacagtggagagtggacggcagcagtcgggggcggagcctcggcctccctgggcttccttcttggacccaggccggatgactggagcccaggacgggctgttcccgtctcagtgtcccatctctgcagaaagagaggcccccttggccacatgaacccccatcgctgcgggaaggccatattggctaccaggggccgggccctgccacctggcctagccagcctcacatcctcgctccccaacggtctgcagtcaggccccagcattcctgggctctggttttgcaattcactaggataacgcggcccttccatcaatgaatcatggactataaaccactgtgccagcgcttgagctgttccccgcaccgccccacagtccgtgattcacctcagggtggtggtgatggggctcggagcccaagagaggatgctcgggcctcaacccagcctccaggctcaaaagccgctcacggccgatctcaggggccaggttccgggaggtgggggctcggccctcccttgccaaagctcaggcctgtggggtctcatgggggtgggtgtggaggggctagcattccaaaagcctatgcccgggcctgcatccccgtgtcagaacacagagaagcttccagaaagaggatggcaccctccattaaacaagaaggcaatcccaccactctaaacagccatgcacatccctcgcctccagccggccacaaggctaagcaccagtgccatggatgccaaggtgggccagagtgaaggcggccgcacacagcgcgggtctgagtccagagacgtcccatggccagcacttttaatcaaggactttcatattccactttataaccatccaagtttcagaaacgtaaccatcgaaatgacacacaaactgctttggtacagggcacatggtgtcggggtgacagggcggagaagggcctggtgcaagcacttcagacagggcaggtgtccttgagatgacacggtggcactggcgtcttgctgctgggctgtggttaagcattcgggtggccacagcatctatgaagcgtggctttgcaaacatgcagatgcacaggctgcctcctgggctggactggccagacctcccttctagaaggggctggctgccatcggctgtcaggcgcgctgacaataactcagctcagagctgcctcatccaagttgggccctggccagggaggccgttgcccaccccaaacacctgggaagggccgttccagcttgagtgtactcccatgggtggtctgggctgtggggtagcccacctcgggcttaacaaccccttcagccaccctgctccctgctcaggggctgacccccagcaccgaggttctcagcagcgtcctagaccaacgcctgggagctccttggaaatgcagagtcttggatctcggccttattgtggggtgaggggtgcggcccagtgactgggtttccccagcccttccggtgattccgacatgcactcacatctgaggactcagactgggacacgtcccctcacaaagcagaccttggcctcagacagggggaactccaggagggcacagccccaggatgctggctacagccatcccagcgtggtcagtggtgtctgaggaagtcggaagcctcgctgccggggaaagtgcacggtccagtgtccctggagtcacttctcacccccagcccacaggcttcccctccctcgggatcccaccacagcctccatttcaatcccaccttgacaaatggcgaaaggaggggcacccatgtccttggtcctgggccatgcaccccccaactcaggaaacccacaggaggcacgtgggcgctgttgaccctgggaggggcggtcgtgcccactccccgacacctcggaagtcctaccctgtgtccacctctgcagcgtggaatcagggcagtctggggtgttgagatgggccaggcgcggctgatccctttaccctattttcggaaggattaaggtcggattcgcatctgaaggtagagtctgacaaccctggcatacagtaggcactgaataaatgcccccggatgaacatgcatatactgtgcatccgatgggcacctcctggggggtctgtggggcgagcaagcttggggacacgaggcaggaaggcccctgcgagcggcctctgtcctggtgacatgagagaggccactcgtgcctgtcttcagcagagatgtggcctggagccacgggcaccgcgccaggaccacaagcaccacagcctctctgcggccacccacagcagcctccacagcaacccaggagagaggggctgtgcactgggagtgggggtgctgagagagcgcaagagacgcagagcgggagacagagatggggaggagagacaaggcgggagagagggagatgaggaagagccctcagcaactccccaaagacatatatggtaacggcggaggcactgagagagaaagagacagtggccagctgctgtccccaggagctgagggacacatggcaggggaagagacacaggtggtggcggggggtactgagccccccccaccccaggactcccacccaccccatatcagagggtgtctccacagcacagatccagcctggctcacctggggtccccgcatccagcatccgactccccactgacatggagcctcatcatgagcccctctgccgcctgccctcgcagggctcctgcacagaccacaggagaggcctgtcctacctggcggatcagggctggcttccagaaggctggctttatggccagtgtgctgccgaggggacggctgggcctccctccaactccccgggctgcatgtgccaggctagaaccctcagtctgccactcagcaggctccttggaagcttcctcacctccctgtgcctctgtctcatctggccagtggggataattacacacctgtccccaacactagtgaggttgaaatcatcacagtgtgtggcgatagtgctgcatgactgttggccggcaccatcactgtcgccgtcatcatcaccatcatcgccatcgccaccatagcggccagcagcacccatccccatcacacagcagggccaggtgcccctggaattttgacaaggctcccatgtctcactggactcccaggtcccatcccccaccagccatcaaggggtccaatgcatattggctgagataacctaagtcttcttccaaaactagagggcccaggaagggagggagaacccgacctgctgccctccaggtaaacatcacggagaagggagcttgagctccctcccactagacgacatcggggaagaggcagacagcatctcctggcagtgggcaccctacccctgagggtgggtgggctcactggctgggaagacccgggttctccatcttcccgtggtgcctggggagggggcccatgtcacggtagggggaaggggctgtgtctgctcactcagaaacctatgagggagagagaagcatggacaagtgtcctggggcagctgtgaggggagtggggctgggcaggggctcgtgtgctccatggccagggattcccatctgatcacaaggcctgagctgccaggataggtcagaaagaagaaccggcccacagaggtaccctgggtgcctgcattgcctggagcacagggcagtggctccccagcccacagtcaccaagagtcccagatgcctgtcccagcctgcaggtgccagccatgctgaggcagcggggtagtgggtggggagtggtctcagttcacctccccaccctccttaaggagctgcaggttctgtgtgctcacagccttggcgcactcagagaccaccactgcctgcacctcccgtccgtcaccgcagccttccaagcagcggtgctgggcccaccccaggcctgctgtgccctcacctggggcagactgatcagcagtgtcagtggctccacaaatacagccacagacagagacgctcagctggcggcagtcactgcatctccacttaacaagacaggctgagcctgaagctgccgctgattttccttgctgccatggggcagagaggactctcagccccagagttagcacttgagaacccctgtttaccccgtggttgtgaaccaggcctgtggggggtggcagggcccaggccacgccaccacctccttagcaaacgcagctgatccgaggaaggggcgagccctggagacagacagggacctcctgcccggcttgctttctgccatctttctgagagacgcagagcagacaagcatcatttccccatcctgggagcccctgcctggaacggcagcttcagcaggggataaaaactcaccagcaaagccccaccaactcccaggcaccgcagataccacggctaaaccaggacatctccggtgtaaagaggggcatgtttcctccctgctatggaacattctagggcttccccggtgccccagcctggccccagacatctaatgccctcctcccctggtctcactgtagtctaacccagaggtcttctacttggggctgggggtgatttcaacagcaagtaagagttgtgtggcatatacagtgttgagctgttttttccctttttaaaaaatgtgacctaagatttaaaatcaggcagtttcacataaaactggatttccagctcgtcatcaaagatcagaacacctggcaattcagggccaatggccaagcgtccactggagctgagacggggcccaagctctgcagtgagccacaggcctcaccactccctactccctccccagacacgaaggcaagtgtgagctgttatttatcgagtttgcacttctatttttcacagggtaaaaaaaaacatctctatttacccatcaaaaatgagcaaaagaaagagggtcacataatctccctttctttgttcctttaaggccctgggaggtaccgggacccccacgaatccaaagactcaggccccctgctgttcctgaagacacgcgctgtctctcatgctccctgcctttgcacttgagggccccatccctgtccgcctgtggggctgctcctcaacctcatctttggggccttttattctacggagtcttcaaggatgtgccaccaatgccacctcccagggagaccggcggcacagggagaccccgcggcacagggagacccgcggcacagatagaccccgcggcacagggagtccccgcggcacagatagaccccgcggcacagggagtccccgcggcacagatagacccgtggcacagggagaccccacagcacagggagacccgcgacacagggagtccccgcggcacagatagaacccgcggcacagggagtccccgcggcacagatagaccccgcggcacagggagtccccgcagcacagatagacccgtggcacagggagaccccgcagcacagatagaccccgcggcacagggagaccccgtggcccagggagaccccgtggcacagatagacccgccgcacagggagacccgcggcactgtcttgaagccacctgtttacaatggctctgaacaaccagcatgaagctccccatgtcctgcacacaataaatgctcaatcaatggatgagtcagcaagctggacattcgctccgcccagagcaagccggacactcactcctgagagcaagccggacactcactccacggagagcaggccggacagtcactccacggagagcaggccggacagtcactccacggagagcagaccagacactcactccacggagagcaggccggacactcactccacgcagagcaggccggacactcactccacggacagcaggccggacactcactccacggacagcaggccggacactcactccacggagagcaggccggacactcactccacgaagagcaagccggacactcactctactggacactcactctaccacagtacaggccaggcctctacaacaggatatgccgggcaccgacaccccccacccttcttaaattaccatggtctccccacctccctctgtgcaaatgtggctctcacacagggggaggggatgggcctctgctcttcagagcccccagcccagctaccaggaagggctcccaccacaagcccagcctcaatgcccccaaacaggtcatgggaggggaactgggaaggccagcaagagaatgagcatacagtaggggcccaacagacgcctgatgatgttttccaaatacctcttgaggccgttagccacccttcctttgtcataatccccaccgctccctgctgcctctcatacctcagcatctatatactccctgactggcacttacctttttgcctctcagtctagaaaattcctgaatgcacttcaatttcaaaaacaccgtagcggctgagcacagtggctcatgcctgtaatcccagcactttgggaggccaaggcaggtggatcatctaggtcaggagttcgagaccagcctgggcaacatagtgaaaccctgtctctattataaatacaaaaaattagcaggatgcagtggcacgcacctgtaatgccgcctacttgggaggctgaggcatgagaatcactctaacccaggaggcagaggttgcagtgagctgggatcgcgccactgcactctgacctgggcgacggtgtgaaactccatctcaaaaaaaaaaaaaaacaaatcccaaaaaaacaaaaataaaacatagctacgtctttggaatacatgctctgtgccactcggccttggttttacacatctgttagaagggcaagcagactggtcaactctggctacagaaaactagacaagaaaaccctctccacaaacgcagccacccttccacgatccctgcggataaggaccgagttcagccccaggcatcgtggctggatgttgggaatgcggcgaggggtggctcatgctcctgacaacagcctcgtttccctcatgggagttttcttaggctgtaggaaagtggctgtttcacggcagacactgggaccccgcccccaacccgtgatggctggtctcaacaccttatgggtctcgacctctggcagcctgggaaagggaaggcggggcagctctggggaggggctagagggtgccactatagggagtaccagccaccttctcccacctgcagcctctccaggcacagtccaaccagccttgtgggtgcaaaacaacggctttaccattctctggggacactttgtgtctaccggccacctggagctgctccgggcctgggcttgacacaaagtgggctttaggcctcaggtccacacaaaggtttgtccaaagaagatggggacttgtaggccacacgtctggcttggcattaggggtgtcagaaagcagtcagtgaccctcagagggacctagaaaagctggtccctccagtccctttgaggcatgccactcctgcctacgaaaacttcactgggatgccaggcacgtagtgcttccagaatccacccccagtttgcaaggacgctccacgcggctcgtgctattcttggcctttgtcactctcacccggcccccaccccagccactgaggaccccaggaaggaaatgcctcgaccgactccaatccagcagctgccagagtgcccactgcctccacccgcctcctctgtgtggtgctcccagcatctgctctgagacgatgcttcaagagcccggatgcaaaacaaattctcccaaacaccgagcgcccaggatccccctttcaaaggcgtgccactgagcctctcatctctaccattatttactggatattttttcaaaccaactccttttcctctaactcggaggaaaaagcaaactttttctatgaagggccagctagtaaacatttgagaccctgtacgccatacacttttggtcacaaccatgcaactccaccagagcagcaaggacgctgccatggtaatatgtaaacaaacaggcatggctgtgttccaataaaactttattcacaagaacagatggtgggccggattagccccagagtcccagtctgccagcctctgctctagcgtaaataatctttcagtctcatcccaagcaacggcgtctgaaaaaacggcgagctgaagtactggctattttttctttcaagtatgtattaagataaacacacacaaccattaacattttaaacatgaagtttgtgaactaccccaagtcatcctgggaagctcttacttttggaatgtagcctttttacgcacagagatcacaggtcacccagtcaggagtctgggatttcacaggctgaggaggcccgtggctgtttctccccagctatcttcctggccactacgggaggctcgagatagcctggcagggtgagcaccccagagggggtctccccacatctgctgctaccacggaggggagcctgcactcacactgccggtggccaagcaacaacaactcatggagacagttaccgccagccatgcggggtgctggccaccaagcaagtggccgctgagcatgcagggagcctgcaaggacagtcacccccaccttgcctcttacctggctcttgccgcggcgccgatagctccgtctcaccaggctcttatagttctcattcttcttagtcaggtagtaatagaggacgcactcagccactgtctgtgggacagagaaagaggacgctgagcagggtacagcacaggcattcagggcaggagccaggagctcacatcctgggctcatatcctgcctcttccacgtaccggctgggtgacctcggacagatgacctaacctctgtgtctcagttttctcatctgtaaaatgggaatgctaattgtacatacttcacaggattatcacaaagatcagatcagttaatacataggtaaagtacttgggacgaggcctggcccagagcaaacatgatggaagtctttcctgttatcacagtcaccgctgttgctatggttaatgacagcgctgacgtcgccatgtcacccccagcccttatgggaaacaaggactccagcccacagccgggcaaactcaaagccttccccaaacataggtccgggttctcttttccctggcttcagccttctcttccctgatatttgaggtcctgaatagcctcttccaagccttgtgcatcgggaccgccccacgccccacgccccacgcgcctcttcctgggtttccttcttttctctgccttggtcttttccatgtagattgggtctgaaagccggagcaaccagccctccatgaaccccggccaaatgggacgagtaaaaggggcagcctcagaaagtgatgccacgatgcccccacttgcgggcatggagcccagcttgccaatgcccacagccgttccccttacaatgtaaaatgtttctgcaatgctctggccagtgccaagccaggaccccacctccaatgggcattctgtgaggcctctgagctgggcctcaaatctcactgccctcaacagaaagcccccagctggcagcctcctgccaagtacgaccgccaggggggctcccaggcggccccaggctaaacccagcccacaaacatggcaatcgagaaagacgttttataatcagatgccaatatttgcaattcaggggatgtgggtgcccgacttctcctttaacaattcaagagagctccttcctgcgctcagcaatggcagcccggctccggacagcagctgcccccgcagacgggcacagactggctggtccacctggctcccagccagacgtcagcctcactcactgtcaagacctgactgtccccgccggcctctccgttggcagctcctgctccagacccctctggaagctctactgaagccttgtcctgggctgcctctcagccaaagaacatcatgaagtttactccccagcacaaagacttctaatcccctcatcctgaaggaggactgctcgatggccagtttctgaaatgcttccatcctggggagccctaacctagagtccgccgtgccgtccactccctgagggagacgtcgtcactcagaagatgggctatttatagggcttgtttctccacactggtttttcaggcatggagagatttttccccactctgctcggtctctctccttctacggttatcagctcatgaggggcaggcgctgggaacagctgtcctttaaaataagtgcctcatcctcctggcctccctcctacaaccaggaagcccgagcagggtgtccaccaagctggggtgggcaggtccccatctctgagaaacgtgattcaggggaatgctgcttaagacacacggacggcagcctttctcctctgaccccaagatgctgggggaaggcccaggggccacgtccaacatgcagcctcatccagccaccttctcccacctgcagcctctccaggcacagtccaaccagccttgtgggtgcaaaacaacggctttaccattctctggggacactttgtgtctaccggccacctggagctgctccgggcctgggcttgacacaaagtgggctttaggcctcaggtccacacaaaggtttgtccaaagaagatggggacttgcaggccacacgtctggtttggcattagaggtgtcagaaagcagtcagtgaccctcagagggacctagaaaagctggtccctccagtccctttgaggcacgccactcctgcctacgaaaacttcactgggatgccaggcacgtagtgcttccagaatccacccccagtttgcaaggacgctccacgtggcctttgaggagctggcaggagacccgtcgggcacacggggctccaggaagcctggccgtgcagctctccctggggttctcgggattcccaggtgctcagcaacctgaggctcctcctccatgggcccaggaggccagggcggggcctgcactgatctatctcccagatggaaggaagggagggagggaggaggggagcatggcagctggagcaaggggccaggcaggccagggccttgtgggcaaggagggagggcctccaccctgagtccacgcagttgcccacggaggtggagaccgaaggggtatggggcgggcagcgactcaccttcctctccaggaatgatgcgatcaggccaaagttcttgggatgctgcatgaacctgcgggacgagaagggtgggcgtgagacctggccgaggggggctttcctgcggggcagccgatcggctcccaggcgcctgccatccccactggccgggcctggcgggcaccgccccacttggagcaattaagcccaggggggtgtgggaagggctgctgcggcagacgggaggggtggggacccaggggtaagagagggcgttccttggagtgagtcactggctttagcgcctttgaaaatatatttgtttgtcctgctggaggcggcttccaggaaaaatgaggacacgacatgcagctctttggtggggttcccccccctttaaaatccacttttgtttctctctccagctggatctgggaagcagggcctcacccagcccacacagggtctgcttgggaacatggcagggccccaccagtggggtcatagctcaccaggctgctgggcctccccagaagagctgggagcagaggctctgagtgcccgtggggcagcaggagggggctggccagccaaggaggcggcaagcatggacttaagtcggagggcggtggcgggtcgctggcactgtcccaactggcttcctgcgtagccaggagaattactgggaaaccactgggcccaggctgaaatgtgagggccaaaggagcgggagcatggtgggggcggggatgtgggtcaaggcctgctccaccccaggggtgctgggtggagtccctggccccaggcccaggcgtcccggcgacgtgccacagccccacagccttcgcagggagagcagcggctggctgctagtgaggctggactgtgggctcccacggagggaggctgagtgagcaccagtgcccgacctgcctggccctccagatggctgggcaggaggccagcaggccccgcgcctgcttcccagccagacatccgaggatcctgaacagtctctgctctcttcccggtggaagcggcgcagtgaggaatggcaggcttccctggcctgggatcccacctcgggcggctggcaaggccggagccatcctaaggcccttctcttccaggtagggagagtcctttcctctccgctccctctccttgtcccagtgacatttccttccctgcaaacccctcccacggggtttccccaggcacagtgggggctcccaagagaccaggaatcaaacttgggaatctcctaggtcccctgttcccctccctcaatacctcacttgcacccctggaagacgtttattagaagtttcctatgccctgcatacctcacaagggaggccctgtcgctatacccattttacagacgaggaaattgaggttcagagggggaatggtcacatggccagcacgtggtggagccccatgccgtcagtaggtgattttcaaagccccgagtgctatcaattcctctgcacatgagacctcaaaccaagcccacagtccttgaggcatgcaagtggccaagttgcggctcacacaggatggaagttacgccagccccacgggccggcagatagcagcccagcctgggtcccccacccttcggttactgaattaacagagggtgacattatcagacctgcagagccacatgagatcttccgaaaggctgaagccgcagaaagtctcccagaacacctttttttttgtatttcagaaaaaatacatacactaaaacatcatgcctaccagggggaacgtgaatctcaaacgcaacagtaattcagtaattcttaacacccgtgaccgtcccaccatcacctccctcgttcaaaactgtaagaagcattcgacggagactttgatttgacgtagaaagatcgtgcctgctatggtgaggctgcaggcacgagccattaagtaaccgagtattcctgctcaggaaccaagcgctgtttcctgtgaaggaccactcactcggtgctgtgggcactccagggctcattaccccacccctctattcttatggacgtttcaacatttccataatcaaaagctactcttaaaaaatgttttccaccaaagaccctcctggatagccactgtgtcctttctgagttcggtatctgcacttgcgggtccactcacccctgccggggacccagagtcaccccatcccttaggtcctgcctggcacctctttggggccacaaccctggaccaaagcccagggcactggggaaggagtgtcattgctttggaggaagctcttgtccggaggcagggtcttccccaaggcagctcagtagcctgccgggtgaacgtcgggcagtgacaaagtctcttccctgcgtcccctcctggccaagcacagaggcctccgtccacacctcagtttcccactctcctgcctcccagagctctgaggtcctgaggaggtgctctatgtcctgggcagggaacccagccctctacgtgcaagtgattagagcaagcttgtccaacccacaggccacatgcagcccaggacggctttaaatgcggcccaatacaaattcgtaaactttctttaacccttatgagatttttggccaggcgtggtggctcacgcctataatctcagcactttgggaggccgagacgggcggatcacgaggtcaggagatcgagaccatcctggctaacatggtgaaaccccatctctactaaaaatacaaaaaattagccaggcatggtggtggccgcctgtagtcccagctactcgggaggctgaggcaggagaatggcgtgaacccgggaggcagagcttgcagtgagcagagattgtgccattgtactccagcctgggcaacagaacgaaactctgtcttgaaaagaagaaagaaaaaaaggaaaaaaaaaccttatgagattttttttgtgattttttttttagctcatcatgtatcattaatgttagtgtattttctgtgtggcccaagacatttctttttccagtgtggcctggggaagccaaaagattagattccccggaattatagcacactgtccctaaggcgtggggtggctcagcagggcccacgatctcctctggggaccccgggccagggatggaggtctccttctgcctggatgtcacatcgcagattctcactgtggggtttggccccctcagacacagcttttgagagaactcgactcccgtctctgctctgcacagcccccctccctggccccattcacaaaccattccctatacagcctctccattccagctggaggagtctgaaccctgcctccattgtgtgcatgctgtgtggcctttgtgcactgtctgaacctctctgagcctccgtgtcatcagctgtgtactggggtgggcctggctgagctgtcataagggacaggagggggaaaatgcatgaagctgagaagacacaggcacagtgatgggatcacgaacccactcagccagcagctattgtcaaagacaaaacaaaatagaaaccaccaaaagccactggccagctgccgccctgcccaaggctgcggcccagcctctaagtccctcctgccttgttcttccgactcgcagtgccccgtcttacatccagctgcccttacactttgtaccatattgaagtgtgtcctcttaaaattcatggccacccagaacctcagaatgcggccttatttggaaacagggtctttccagatgtaattagttgaagtgaggttgtattgggttaggctagaccctaaattcagtgtgacgggtgtccttataagaagaggagaagcacagagacaaaggtcatgtggggtcgaaggcagagcatggaaggatgcatctagaagccccggaaggccaaggatgctggcagcaccagctgggaagaggtcagggacaggctctcccttacggcccccagaaagaaccaaccccacgaaacaccaggatttggacttccggcctccacaaccaggagagagtaaatccctgcggttttaagcaccccccggcatgctcatttgtggtggctgccgggagacagcgcaggcctcaacaggatgggggtggggggccgggaggccaggccaggtgatggaggactcacttctcccggaaggtctccttctcctgctcactccacatgttcatgacctggcggtctttgtacaccttcatggggtcggccataagcccgttcatgttgatgaacttgatgcgctgctggtcagcgtcgtacagcatgggcgggatcacggccagctggcgcatctgcttctccaggttctgcagggaaacggagggcagggtcagaggcccagggacgaggtgctccggccggcgcaggggacccagggaagacacagaggggacggatggtctgcgccagagcagggaaaacgcgaaaccaaggagaaggagaatgatgagtttaaaaataataatagctcatgctgggggaagggagaatgtaaaggcctccccgacaggtttatggtgggcaggactgtagattcaatgcagagagcagcagccgccttctctgcagtgggaggggagccatgaatcttccctttggaaatgcaagcgccataaagcactgcaggaaggatgctcagcccagctgggcccagggagcccgggagacaggctggccttccaggttccgcaggcaagagtgggccctggggtccagctggccccacagcatgcaggcagcccaggggcgcagagagggtcagcgcctcgctggtggagaggtctttcctgcccccacactacacgccccctcccggcaccccgctccttcagagggcccacctgggatctggcctgcccagccctgcatgcggcaggagtcaggcggccgctcctaatgcactgggatgactattaagaggctctgagccgccactcagctgggctcacttccccaaatctcgcagccagccaattactggcgattaattacccatctccggaggtaggcgaggactccgcgtagccaaggtcagccagttcaaacgatccagctgcccggccgcccacatccaacctcttcactcaatgtgcaggactcccagccaggggtcaggtcgggtgcggggcacagctctgaccccggggtgggagagaatccccccaagaggctggcatctgtctcccagacccttggagctgtcccctacacccctgatacggaacggcgaccttcctcgggtatcccagggatgtaataatggcaggacccccggcacggccacaggcaggacctctgctctgccctcccacagctgccttcctgtccttcccatgccggccatgtgctctgaccacaggaagctcccagaaggatgggaagtgcctgtcctccggcccagccccctcccttgcacactcccgggggaacctcaggtcaccccaggctggctggggaagtttctgtcccaaattccacttccacccttcaccccggacacagcatccttgatgtccctgaggactctgatgactgcattcccatgtggccagtgtgtgtgtgtgtgtgtgtgtgtgtgtgtgtgtgtgtgtgtgtacatgcaacaatcagcccaggtgccacacccttggccatcaggtgaggaatgcagaggagagggccaccggcctcctccttccagtgcagactaaacccacagccagcctctctgcgggatgtccataagtgcacagcatcggtgagacaggggctgacacggcccagctccggcgcccagccttcgagggccgggccctgtggctgtgcaatgcgatggctttctgagctctgttttctgtcaactggatgttgttgtaaacaaaaacgtaccacgagaagttttaaaatgaaaaattatgttttaatggccagattcatctttggattgcctgcgtcagaatcaagtgggtggctgggtaaaaatgcggattcctgggctctgccccagaccagctgaatcagagtctctggtgagaaactgctacttaaaccagccgccccctccctggggccccttccatctgtctaatctgagcatcagcatcgcagggcagcgcgttctgttgtccaacagagcactctgcagccagggaggtgttcgctgtctgctccgcccaggaggggagctgccaaccacaagcggctgtcgagctcttgagatgtgtcagatgcaaccgaggaactgaattgctaattttatcccattttaattaattttgatttcaatagccatgcgtggctctgctgtgctgagctaaagggctataatctcccatctggacaaaagctctccctggacaaaagtccccagaaggaagaaacgtgccgtggctgcctcgtgtctgctgtggtgttaggagcagggggtagtctcatcatgggtacctgacccacaggacccgggagggaacaggctgacaccaacttcctccccaggagaaaaggctgcctctctgcttcctggccatctgtgggccccagtgacggcagccagggtcacctaggctgaccccagggtgtcctggcaccccaaagaggcctgaggggaaaccggccctgctccagccaggagggctgaggtgcctgcgagaaggtcgtggctgcgtggacagctggcgtgctgggaactcttcggcctgcgccatgctccccccaccctgccaggctctgggccctggaaggctgaccctggaacccacaggcactcccgccccttgggcttctggctggactcagccaatgggaagttccaaaaggaggcaggagatgggaagagtgagaggcagggtcctcgtcccccaaccccctccctgttgtggcatctggatgggggagcgccagggccctccctgcagggggtcctgctaccctccctctcagacacattaacacccctctctctgctcgcccctgcaggcctgggacgggtacctcaatacccaccttgattccacccgcgcttcggtggcaaagcccctcgacgtaaaccacccgggaggtggtttctggctagggcctctgcaccctcacgggggatgccagggaaaaggagctgaggccagagtcagggcctggactcacctcctgctctgagaggccatcgatgatctctgacacctcgtgctcgctgcgggcggccgacatggacagcccactgccccgctggcccaccctgctggggaccaaggggacacactcaggaccggtcttctggtggtcggggacactagcagacccctgtggcgcagccctgagcccacgccctccccagaggagaagtgtgggcagcggccagcagaggggccggccccacacccggggtcctggggaggcatggagcccccaccccaacccagcaaggccaaaccctgtgacatgggcagctcagtcccttcctctctcctaaaacaccctgaaaagcccagctacaaagatctgggttcaaagcccagctctgcctctttggccctgggccgaagtgtttctctctgtgcctcagtttcctcccctgtcatatgaggattcaaaagtggcacctggctgcctagagctgttgtggggaacttaatgagacatggcttgtgacttcagttaagggtgaaaggtgttgttatcattaccaatgaatcgccttatctgtgcatccaaagaaaaatggccatagaaccacagctgcctgtcaccaggcacctctcagatggggcccacccagtcctcacagccactgggggaggctgacagcgtggtctcttagccacgtctctcccctttgtcccacaccagggatctcaaactcagctgccttcaggggtcgtgcaggccccagaaatgagtgaagctggcaggtgcacgctatggcacatgggaagaagtgcttgtccccaaaatgtatttaagttccaagtaagtattaggccaaagaggctccacgtgacacaggccagggtctggtagggccctggccactggcctgagaagctgctgtgctgttctgttccttcctggccaggccatctctactgaggatgctggagctgaccccgggccctgacgtcgggggccctgggctcaggccccgctcacctctgcatgcgctcctgcagctcgcgctgcttgcggatctcagggaactgcttctcgtagtactcgcgcaccttgctctccttggcccgccgccgggggttgttctcgatgcgctccaccttcttctcccaggcctccatgagctggtcatagcgctggcagaacttctgctcctgggagagcgcagggggcactgcggaagatgctcctgcacctggcacccgccgcctcccccctgcccactcacatgcaggcagacacacaggtgcgtgcgcacacacacaaagtcacacaggcacacacatatacagtcagatacagccacacagacacatacatacaggcacacacatacagtcagatacacacaggcacacaagcacacaggcacatacaagtcacacaggcacacacaaatgcagtcacacaaacacacatatactcagacacagtcacagacatgcacatacaggcacacacatacagtcagacagatatacacaggcacacacaagtcacacaggcagacacacatgcagtcacagacacacacagatacacaaagtcacacagacatgcacacacaggcacacacacatacagtcagacagatatacacaggcacacgtacatacaggcacacacaagtcacacaggcagacacacagacacacacatacagtcacagacacacacagtcacatacacacatgcagtcacccacacggtacacacacagtagacacacagtcacacagacagtcacatggcagacacacagacagatacacaggcagacagacagacagacacacagtcacacaggcagacagacagtcatataggcagatacacagagagacacacacacacagatatatacacaggcacacatacatacagtcagacagatatacacaggcacacatacatacaggcacacacaagatacacagagagacacacacacacagatatatgcacaggcacacatacatacagtcagacagatatacacaggcacacatacatacaggcacacacaagtcacacaggcagacacacagatacacacacatacagtcacagacacacacagtcacatacacacatgcagtcacccacacggtacacacacagtagacacacagtcacacagtcacatggcagacacacagacagatacacaggcagacagacagacagacacacagtcacacaggcagacagacagtcatataggcagatacacagagagacacacacacacacatatatacacaggcacataagtcacacagccagccagccagacacacagatggtcacacaggcagacagacacacagtcagtcacacaggcaggcagacacacacacatggtcatgcaggcagacatatgacagacacacacacagtccatcacacaggcaggcaggcagacacacaggcggtcacacaggcaggcagacacacacacacggtcatccaggcagacatatgacagacacacacacagtcgcaggcagacaaacagatgcacacacagggtctcgcaggcagacatgatggacacacatacacagagtcacacatgtagacacacaacagacacacacacatcacacaggcagacgacagaaagacaggcacatagttgcatggctatccagcagacgggggcccctgaagaaaacccacagacttcccctgaggacacggtcacctcccttcctggtgaaccggccacccagacctggcctcctctgcagaggcctggtcccaaatggaagccacccaccatgtgtggctcaactgaaatcacaaatccagtaaaatttaagagtcgggctctagttctccccagccatgcttccagtgtccagcagccacatgcggctggggctccggccgcaccagacagcccggatggagcccactgccacaccacaggaagctgtgctgtacaacatgcgggcccgtcagccctggggaggggcagccgccagagaaaaccacattccaagcagttcctcattccccagcctcaccccaaggaccagctgtgaggaccccagcagctcccagagagggggctctgccttccctccaagacaaggaagtccctctccacatctaaccacagtgctgcctgctgcatgtcctttgagaagagatccccaatcagcccagagcatagctgcctggcttccacatctccaaggtgacttgagcaagtggcggcggggggcggggggtgggggcggggaaggggacgcagggcgagccacccacacaaccccagttactccacctctaacagctgggggtggacagacggtgtgatctgggagcctccacaaacacccacttggtgcttcggtacagtcagaaagcccctctctggtcctggagcccagacacctcagccccaccccaccccatatttcagctgctgaccaagggcaagctgtgccctccatcctcgacagccccgtgaccatgacggtccccacgaggtggccaggctggtgctgggtggcccagaacctaaccccatgcatgcaggctgtgccaggaacgcgctggagatcaagaggcagttctggtgacagacaacggccacacgtgctcggggcagtggctgctgacagccccagtgagggatggggactgcagggacggcaacaaccagcccatgccacctcggcccctgtccaagaggccccaggctcatgggtgagaaaagctcacctcaagccagcagaggaaagtcacgtggtgactggtgcagaccagcgggcggaagccaacaggccactggccagcggggcctcagcctgtccacattgccggcagggcgctggcaagacggcccggctctagctgggtccctcgtggagtgcacgggtggcaaaggcctccagcagtagtgtccctgaggggacatccagacacctccatggccccaagcactgggctctgccttctgcccagaacaaggaagtccccctctgggtctaaccacagtgccacctgctgtagcctgtgcctatgtccactgtgctgggtgtgcattcggtctgcctcggacagcgcagggcgggcagctccggcctggcctgggtagcagggaagatgctcactggcatttttctacaagggcagacccactggccaggggaggaaacagatcccttcctcccttccctccctccctctctctgtcttacacacacacacacacacacacacacacacacacacacacacacacacacacacgcacacacacacacagggaaagactggagccgtccccctcccgccccccacccccgccagctagtctgcggggtgctaggagcgcaaatccactagggagaagaagcaggccagccatgcctctgggaccacaggctgagccagtctctcagccaactgggcctccagagggtccagctcagcttcccaggagatgtggcaggcttggggggctgtgctggtgctgaggatcccatgacagggacgaggccctgctctctgggaagaggtatgggggtccccaggaacctgctaaggtgtgggggtcccagggtctgaggggggtctgactccccagtgggggtgaggcaggcacatcagagttctcggccaagcccccctccccaggccttactgaaatcaatgaagtcagggacttcggcttcttataccacaacaaagagaccatcccaatcgccaccgcagcttcagggggtgttgaatttgtttccatccctcctaagatgggccacaaagccacaccggacccttcttggaagtccttggtttctgcctgcctcttctctagctttaaataagccaatttctccctccaccccctccacagaccccccaaggagccactggcgatctttaaagaactcaagcccaccccaactccacctccagcctgagctccttccagcagctgcagcgatccttttaaatggaaatcagatcctctcctgccctcccgagaggagccttcaccccaaggggggaaccatggggggctgtcaaggaggcggcaagatcgcgctgaattggcagtcattttaggtgaaaatgagaggatttccttcctcgcaggagacagagggggagtatttattaggggtgaaggtcggcacctctgcacctattttccaatagtgcaacaacaaacatgttatacacacagagcaaatacaaggcaatggtaaccgtggctgattctaggtggtgggtatatagatgtgccttgtactcttctgtcaaatttcttagaataaggactttggattctttactacaaatacatgtattaagaataaattcggtgtcccactgcattcggaataaaacctgaatgttccatcctagcctgagggcagatgtttccacgcgacctggctcctgctgctggcctgccaggttctgtcccaagctggttcctgcctcagggcctctgcacttgctatgccctctgcctgacaccctgactcccagatccgcacaaagccagtcctttctggtcattcccacctcagcactgaggtccccagcccatctcgagagtctagccctctgtgcagctcttctccccagattaccggtctgtttcctggcctgtgactcccgggcacccagcagccctgtgtgggtatctcttaacttgataaacagattggacgctcgtttcaagagcctctcgcaccagcccaagtgcctgtgggcaccatccagtcaaggtgggggatctgaggaagctgggcaaggcactgctgggcagcccacctctcctcacctatgagcagggcttgggtcccgagggctgcccgcagcttcccaggcaccagcatctggctggaagtgtctcctccctctagtacccaaccaagttcggggccagagcaggcaggcagggccaagggaagaccctcctcccatatagcacagcccctccttccaaagccaggacctcctgccccagctaagcccctcacctggccccacgtgcccacacacctgcccaggaccccatgcctgcccagggtccccctccccaggcactgctcagccccaccatgtggccgctcaccacaccaccataccccacacaccctcctggactctctcggaactgccccttgggggttcagagcatgggctcaggaaccaggtggtctgggttcaaatctcagctccaccacttcccagctgtgtgacctagggcaagttacttaacctctctgtgcctcgatttcctcctctgaaacatgtggctgaccaagcgcccacctcgcaggactaaatgccctaatgtatggagagcactcagaagagcgcctgcaacacaacaggcaccggaagggcagggtgtgcgggcatcctcctcgtccttacgcacgacctgtccctgcagcctgcaggtctgaggacagggcccgtgtcacagcaactgcgagcctcacacacagtaggtgctccgtgactactggcatccaggccccaaaggcactggatcagctaacaccctgtcccggcccatttcagttcaagcaggacttggtcatcacctactgtgtaccacagacctacaggcgctgggcatgactgagccaggcctgcgcctgggagggcctctctggaggcccagaaaggatacagggagctgcctcgcaggccctgcctcaacacagctgagggagagaggaggtggggcagggggctgcaggtatgaggggagcccctccagcctccagcaaacctagttcccagcccttgccgcgtctcttatccaagaatcccaaggcagcagtccccatccagcccgcctcttccccaggtggggaccttttcagggcctccccagccttatcccattccctaccatgtcccagcagccccgtggcttgggtggagtcaatgacatcatccccaactgtagagaaagtcccatgagccaaaaccaggcagcctcactccatctccccggcatcagccactggttcacaggacgcaggccctctcctggcctaatcagagcatctgtgataccatccgagaaagcacagctctctccggctcccacctgctatgggaattcaggttcagtttgtcaatgttctaacataaggagttgaaaaaactgcacaggaatgaaggggctgggtgcagtgctcacacctgtgatcccagcgctttgggaggccgaggcgggtgcatcacctgaggtcgggagttcaagaccagcctggtcaatggagtgaaaccttctctactaaaaatacaaaaattagccgggcttggtggcgggcgcctgtaatcccagctacttgggaggctgaggcaggagaattgcttgaacccgagaggcggaggctgcagtgagtagagaccctgccactgcactccaacctgggtgacagagcgaaactccatctcaaaaataaataataaataaataaacaaataaaatgaaatgaaatgtaatgaaatgaaatgaaggcaagacttgagttgaaagactattcctgccatctacacccaacagacatttccagctacagccattcctttcctgttgaagcccatctgagtccgcgcttcttcccctgacagctgggagaatactcaaccctgatctcctccggggaatgggtgatggccacggccgcctgaaaccaccaccacatgcctctggcagacccagcctccccgccgtgggctgagatccacagcctacagtgagaagcaggaatcagcatccttttctgtttggatgaggccactggccacaaatgcaggctcagggaaagggggctcaatgcttgtccactgtctcagtttccctgagcctggacctgggcccagtgcaccaggaaaggctcatttgtaagggtgcgcctgcggcccctgctgcccggcacacagcccaccctgatcctccacctctctccaaaacctctctttctgcctgaaaagcccaggacaggtcccgtgaccagggcttagcaactaattttccaggccaacattttgctttcttcccttccaggctggaagaggggccatagagcccccccacccccacccaccctggggccttctggaagcagctgttgtctttcctcctttcctggccggccttggcttttcctccgcagcctggacactcagggaggacacagctgcggaactgacagggccccggcaggtgtggccccctgtgcgctcgattctccccagatctcaaggaaagctgatgggggccacggtgtggacttacccattgtttccgagcgtgattcctcctcttgaagtacaagattagcttcttccgcatcgcctggtttctgtgcaggagggaagcggcagacaggtcagcccggccgggctcaggcgctgcaccccgtgccatcctgtttgctgagagtgagccccaaatttgccccgttattggttctcagggagatgagacccacccgtgctgtatccccagagagacctgtgagctgccaacgtgcatccttactcccccgcgcgcgaggcagcccccgccaacgtttaggttgagcccagtgtgcaggcaagagggttcccagagccgaggggcctgtggcttcccgcccccgcccacatgcaccccggcagccacatctgcccacggaaagatggccacggagaaacagccacagcctccaactaggaatacaggccacagagcccgagaccccgagacctgctgccgcccacaggccgggtgtcagagtgtggcctgtgtggccccaggattggctccaaccaggtgctgtgcatggacctccagcacacccagtcctgctgcggggggagggacacaagcagtgtggggcagctggtggggccaccaggcatggacttcaggaaacccccgggcgggggcggtctcagacttcagggcagggcccatggggtctcaaccaagcaggttacacacaccactgcaggctccaagagaaggaggcacgtcctgggagacgggagtttcagagagagagagggagacagagacccagaaagagagggagacagagacccagagagacagggaaacagagaaccagagagagagagagagacagagacccagagagacagagagagagagagagagagagagagagagacggagacccagagagagggagacagagacccagagacagagggagacagagacccagagacagaggaagacagagacccagagagagggagacagagacccagagagagagagacggagacccagagacagagggagagagagacccagagacagagggagacagagacccagagagagagagatggagaccctgagacagagggagacagagacccagagagagagagatggagaccctgagacagagggagacagagacccagagagagaaacagagacccagagacagagggagagacagagacccagagacagagacccagagacagagggagacagaaacccagagagagggaaacagagacccagagagagagagacggagacccagagacagagggagacagagacccagagacagagggagacagagacccagagagagagagatggagaccctgagacagagggagagagagacccagagagagagagacagagacccagagacagagggagagacagagacccagagagagagggagacagagacccggagacagagggagacagagacccagagacagagggagacagagacccagagagagagagagagagacagagacccagagagggaaacagggacccagagagagggagacagagacccagagaaagagggaaacagagacccagagagagagagacggagacagagacccagagagggaaacagggacccagagagagggagacagacagggagacagaggtgagaaagagacagagactgggagaaggggagacacagagacggagatagatagacagatgagatccaagaaaggacagagacctggagatggacaggagatgagactgagaggtgagactggagtgagagagatgagaaagagaggatcagagagagagagagaggcagtcacagagagacaagatccaaaggaaggggacagagactcagaggaagatgaaactaggagagggaaagagagagaagtggggagagggaaagagacaagacccgaagaaaggggacagggaccctgagacaggcaaagggagggagccctggagagtagaggcgggaggttctggagcccacgccatgagggctggaagacacccccacccactgctgcaccgagaccccaggaccgtcctcttctcttcccaggcccctccccacggtctccaacacacaaagcagggtgctgcagctggcctcccagggcctggggggccacagcgacctcaggagcctgctgtgcaccttaacttgctgtctgtccccaatccgcggcattcagtggcacccgcttttctggggaggggatccccaactttttcatattctcagcagtgtccaaaccccctcaaaagttccaaagctactgactgggagccacgctatgtccagcccccgggaccccagccccattggaaacaggaaaaggagggaaccccaggctctgacggacgagtgaagcctcatggggctcaagggcctggaatccacctcagtccccgggtcattctggtggtgacttggccagggcctccccaccttccatcagtctggccgccgccccccggccagggtgggccatgggggtcctcagtcccacaggctaggaccagcacccttcatctcataacagggtgtctctgagcacacctcagaagccctcagtttcctcatctgaaatctatggcatcgcagcctcatcttctgttattcaataactgtttactgagcatctactatgtgccaggcactgttccaggtgctggggacacagcagggagcaagacacagttgagggctctcacagaggtgacactgacaataagcaagatgaccaagataatcctggatttgggaacttaaatggaatggtgggctagtgggtgctgggggacggggtgtgaggggctattttagattccgtggtgcagaaagatctcccagagaggatggccttgagctgggatctacgtcatcagaaggacccggctctgggaagatccagaaggaagggaactccagctggagggcaccgcaggagacaggaacaaactctgtgtatcggaagcacagacagaggaaggccctgtggctggacagtgctggggaggggcagagaggacggaggaggggctgtgagcaagactggcagggccagtcctgcagggtcctgtgagtttcgacatggcaaagggtttggtcttttatgcaaaagacagctgtgaaggcctagaagcagtgaaggcccaggcgccatgagcacagcagcacccatatctcagcaaagaccatcctccaatcccagaaaccgcgctgcccgggccatggctgattccagcgctcggccaggaagtatgcaagaagagcccagagtgactttaagtcaagaattgccaaaaacaaaagaaaacaaaagtcaaaaggacacagaacccagcctgaaggtttccggctgccagagctggaacaatgtgagtgacaacagaaataaccctgggactagattagcgtcccaggaataaaacaaatccccacgagtccatgtgattacaaacaaatgattcaatacatcaatacatggaggagaagggacagatctttcttctagagttccaatgaataaatgtccaagagaggagggaaacagaaaatcgtcattagaacgcagtaataacccaaccaccgctggcaagatccggggatgaatgctaaattggttggcaaaattttaaggagcaacaggaaatttgcacagtctcaaagaatctccccgcaagtatgtatgaatcatggcggtggctccacaaatctatattcctccctccaggaggcggagcttaactcccctgccctggaagatgggtgggacttggtgactccctagtaaagaacagagcaaaggagggataactctaaggcgacagcggagacctagggcagagccccctatcatgtgggcatcacgcagcccccttacctctctctggtcttccccaaaacccaccatcccagtcttaccaggaggaaacacctgtcaaagaaagccatgaccagtgatcttcaaaagtgctggggtggtgaaaaacaaggcaaggctgagaagccgtcacgggctggagactaaagagacacgagcacaaatgtcacgtgagaacctgaatcagatcctggaccagaaaacagacgttggcggagagacgggtgaaaatgcaaagacagctggtagtttagcagagggtcatgtgccactatttctttcttagtattttgttttgttttgttttgatttttgtttttagagacagggtcttactctgtctcccaggcgggagtgcagtggctcgatcatggctcactgcatccttgaactcctgggctcaagcaatcctcctgcctcagcctcctgagtagctggaactacaggtacatgccaccatacttggctaatttattttttggtagagatgaggtcttgctttgttgcccagctcgtctccaactcctagcctcaagtgatcctcccaccttggcctcccaaagtgctgggatgacaggcgtgggccaccatggcaggccctagttgtggtaagtgtttctctgctgttatataagctgtccacatgaggggtgccaggtgacgtgtgtgggggaactctgtggagcgtatttgcaactcttctgttgcacaacgtacaatctagttacttcaaaataaatagttccaccttctcacaaaagaagagagatagaatccactttgaaacaccgtggtgaagaccatacaaaattgactttggggtttgcaggtggtacactgcctagtacaggtgggaatgtcacccccaaccccaactacaaaaaaactgatatgtgtaaagtcctaagccccagcacctcaaaacatgacctcatttggaaacagagtctttagagcgagaagcaagttagaatgaggttactggggtgggccctaatccaatgacttatgaaaaggggaaatttggacaaaaagacagacacacacggaggggagatgacgcgaacagacacgggaagaacaccacacgaatacaaaagacgggagtgacgcatctcccagccaaggaacgccaaggaggccggcagccgccaggagctggaaccggcaaggaagcagcctcccccagagccttctagagaatgtggtcctgcagcaccttgatttccaactgctggcctccagtactgtgagagaagaaagttcctgccattttcagctgcccggttcacggccgagtgttaaggcagcgctgagaagctagtccggcgtgtgatcttccacaaaccgcggtgctgtcactgcagctggaaaacgactcggtgagcatgaggcctcggggtggtggtgatgtgcatgcagccgtctgtttgccaccgatgggcagcaactgagggtgtgaatccaccctggctgatccaggtttcctcccaaagcaaggacactgcctgccacccagagacatccacgtaccacgcaagaggacacgtcaagtctgcaaacacatgtcaagtccgcagggtgcaaactgcacagtgcacaggccagagacagcctctgagggtgttgtgttgggctgtggtgctttatttatttattttttattttttatttttttgagatggagtctcttgctctgtcacctaggctggagtgcagtggcgcaatctcggctcactgcaacctctgcctcccgggttcaagtgattgtcctgcctcagcctcccaagtaactggggctataggcacgtgccactacgcccagctaattttcgtatttttagtagagacggggtttcactatattggccaggctgatctcaaactcctgacctcatgatctgcctgcctcagcctcccaaagtgctgggattacaggtgtgagccaccgcacccggctggtgctttctaaaatcctaaattcattgccagcactgaaaaccagaggctgttacacaaaaagccaaacctaaagcttctcttgaaaacatcaggccatcgggccacaccccttcatggccacaggctgggaaactgaggcttggctgctcctttcaaaggtcgcccagctccccgttcctcagcccctactactccctattgcctcacaccagccctcctcactcaaaccttccttcccgctcctggaggcagccacctgggggactcctggtttatgatgcccacgtgttcaacattcctctggcaaacgtttttttaagtgtttattttgttccaagcagtgtttaggcaatgaagatgcaaatagcttactgcagacaaatcttttctgctgagcttctgtccggcaagcataaggaccacagtctgtaggagggctctggaggcatggggtaagcagcatgtgatgagtttgctggtagaggcactcatggggtgcaaagaagtcagggtttaaaaacacacaccctataaggaaacctagtcttgccatctgccagggcactggagaggagaagcaggacataggagggcaggataaggaggcaggaattatgagagtattccaggggagtccggttggaccctagctgggactggtcctggggtttatggggtactggaaaaggaaagcttgggggcaatcaggggaggcttcctggaggaagggaggtttgagctgaggcctgagagaagcagaggaatgcggtgggaagaagaaaatgagcagagccctgggttctagggagggaggcagcaatagtgaatctggagagggcagaaggggtgctcagggagagcctgaccccggctgcaggggagaggaagagggaggcagatatgcagggcccggataccttgggaagagactgcgggttggggtgatggtctgaacctcctgatcactgagcgccaaccaaaagctgtgacagtgccaaacaatgtgatgtgacttgtctaaggtcacccaggtagggaggggcagggcctggagtagagacccaggagaggaagttggctggatgtgcagttaggactggtctaggaatttgtctgtgtgaccctgggggagtcatctgatgtctctgaacaagaccagagagacctgctaagagtaacctgggttctgactgatccccctttccgcctgcacagccccgggtctgacagttcccatcagccgacccccaaatgaggcagcaggagggaagaaatcaggctgcgaaaagagaaaaacgagcaacggaagaaaccggcttccaggcctgagggggccggtgaaccagggcaacccccgggcaggcagaggcagaatgtgcctgagcgccatctgccgctcatccccaggtcccacgcactttcaccacatcccacgcgggctccatagactcccgggaattcctggagcatcctgcccagggtggggcccatccctcgatggagcccccatctcctgcccctctgcggctgccccggccccgccccggtggtctgagcgctccctcctgcagcaggggacaccagcagcgcccgaagcaggtggcggtgggagggcggcggaggcggctacgggcgactccaacgcgtccgaaatcgtctgtgcggcaggaagtcaagcgtgaaattaactttcactccgcggccccagcatgcagacgcagagaaattaaagtgacggggcaaggtctctggggagggaacgacctcccacctagaagcaatgacagcagcgggggcgaggaggccgtgagcgccagggaggctgctccaggggaagctgggagccccacctgaccccggctggatcatctcattgtcccatggcggcagtcacttatcacaatgtatttattcttatcagcctcccctactagaatgtcaggcctcattcactcctatctcctagaggcccagaacagtgcctggcgtgtagtagatgctcagtaaatatttgtcgaatgaatgagtctgggtctctgtagacaaaagaaagaagaaccaaaaacccagtagtatgtgctgtacgtgctgagcactgaccttagtgagcacgtctgaaactgagccctagagggcaagtgacttcccacagggacacacagctagtcaaacagccaggacgagctgcggtcccacttgaggtccctgtgtccagccacatggtgggacggggcctgcacggggcctcccttcccatgtcccagcactggacacgagacagtttctgcagtctagcatgagcggtcacaaaacatcagagcctgcaaggagtgcagggtgcagaggctgccaagggcagcttcctgggcactgcagatttcctgaacattatgcaccctcagcttgcaaacctcccagtgacagggtgctcactacctacctcggcagctcctgcaggggccttcccatggtattctcacccctacccccaggtccttcctccctgcagccaccaaagtgaacttttaaaacaaaagtctgatcacattgcttcctgggataaacttcatcactattataaacttcatcattattatcccaacagataataaaaccggaactccttaccagccccccgtgacctggcctgtgccctcctctcccttgcctacctccttgggccatgccagccttctctgtgacccctgccagctcaggaaggcctttgcacctcctgttccacctgtctgggacactccccagaggtccacacagccagctgctgctcagcctacaagggtccccttaactgtcatggcctgccctgacctctctggctaatgtcaccccctcattttctctcccattaccccacttaccagagtaatagaatttttaaaaaatgaatgactgcacaatgaaatttaatgataaccagattgaaatctaaaaaatagaagggatgataattttagtagaaaatatccaaaaaactaaaattattaggacaaatcagttccaacaatttacacacaaaggtttttctaacagaagttgactacttacagtgtaggaaatcttaattattcatctatttgttttatattatactatattacacatattttttgagacagagtcttgctctgttgcccaggctggagtgcagtggcgtgatctcggcacactgcaacctccatcttccaggttcaagcaattctcctgcctcaacctcctgagtagctgggactacaggtacacgccaccacagccggctaatttttgtatttttagtagagatggggtttcaccatgtcggccaggctggtctcgaactcctgacctcaagttatctgcccgcctcggccttccaaagcgcggggattacaggcgtgagccaccgcgcccagcacatctagttgttttaaatagaaacatgtttgtttgtgatttagatttggaacaaattcagtgaggcggttacctatttagtcaaaatgcacttcaacggaccacagtcattctctgaggaagattatgagatgtcaaatacagcactggctttaatatgcttacagttttattctacttacacaaagatgaagcaatatctatttgctggtgtcatctatatgagcatcttgctcctcttttgtttagattctatggctgtctttattacctgaaatcaaccacagtattcagcttaaaatatcactcactttaagtgaaaaaaacctatgtaaaattgtcagtataataatatggctatcaaaaattattatgtcaaaaagaaaaatcataactaggtatatgaaggcgtaaagagcttaagatagttatgtcagcatagtactttagattcgctggtattttctttcttttttctttctttcttttttttttttaacagaaacagggttttgctctgtcacccaggctggagtacagtggtgcaatcacggctcactgcagccctgaactcctgggctcaagcgattctccctccttcgcctcctgagtacctgggaccacaggcacgtgccaccacacccagctaatttcttgtcaatttttgctatgtttggccaggctggtcttgaactcctggccccaggcaatcctcccacctcagcctcccaaagtgctcggattataggcatgagccactgcacccggctgtattagctgacattctcttgttttgtttacttaactcattctggttctgtctccactgctagacaaatcttgatgagggatgaggcctttgttttatccaaggctgaatagccaaggcctagaacgggacctgacacacagcaggctctcaataaagatgggatgaatgaatgagggaatgccccaaacagcctggactcagttgagaacaccccaccctcatcccctaaaccacctgtgatgaggtcctaagaatgtcccccttgctttcagcacccctccatctgtggcttcccaccccagacaggggccccagagcaaggcaggtcccaggaagctgcagaagggacaggggtagcccaattggaagacaaactatgtcgagtcaaaagggatctgggacctgggcaatgaatgagcccgccaggccgatgaggagcccaggctgcatctgacatgggccttctgtaccagcccgggacccctggcgcagaacacatgccccttcctgacacactctgcagcccctgctggccactggctgaggatgacccccccgccagccacgctggtgaagtatctttgtcaggtgctcctgaacccgagaaggccaagggcctcaactagcaaggagagattttctaggctgctgcaacaatgaccaggtggccaagttgatcacctgagcttggaccagtcgcgcaactctggaaactacaacagcagcgatctccccgtcgactagtccagcaccagcagatgtgtgaaaacactggaaggtttgcacgctttcaggaacggggagctcaccaccgcatatacactctgtagttccatcccaggaacgcttgaacaatcggaccgggctgaactacccaccgaatcagctaaacgcctccctttgcagccacactcaaacgcctgtaccctctcaccatgacgaaccttgaacattcaacagctatgatcctgaagagtctcacctccaacctaccagcccaccacgtggccatatgttcctcaaggggcaagatctgcagccccttttaccttttgggttcctgggcactaacatgagataacatgccctcctcggcccaacagtctatgctcccgttaatgcatcccaagaaaaagccagcccccttccagctgccacacctccaatgccttgtaccccgcttgaagatacaatgctaccagcctccagcaccgcctcacccaatggcagtggcacttaattgacattttcttccctcctagcaccggtctgggaaaaggcccccatcattagaatacatcacattggccacctccaaagcctcagggcctggatgagtgctctgatctgccccatagtgggctgtgccagagggacctctctgtgcagacaccaggtgattcccaaacatgcttatgccagagcccaaaacaccaggcccccgcctgctctggggccactccccatctccctgagccggctgccttctgcccgcaacagctccctcctgctcgaacaggatgcagatgtacagcctgggacctctgacctccgtctctccagacccacctgtgcaccagcagctccctcgcccaccctcccaaacccagcctgtctcccaaaacctcagggggacactctctctgctccccacccccaccccaggtgccacctaggactgtctcctgtcccctccgggagcacctggccctggccgggagcccctgatgggaacagagagcccacgtcccacatcccatgcaggctgctgagagcctgctcgcccaccctgcctctgtgtgtctgcacggctgcccgcgagcactcacattttgatgttctcatgatactgccgggtgtcggagggctggttgtacagcggctgcaaagggagagagagaagcacatcagagcctggctggccactcgccactacagagcccaccggtaggagccacagccctggcacggaggagctgtcctctgggtgagggctcagccgcaggcaggcatgaaacagaacacagggacccagcacgcagccccagccaggaacaggctgaaactggttcctcgggaacagctgtgggtactgtgaccacccccaccaaggtcgtcatggctgctctgcggggcattcagcagtgctggcctggaaggggccacagcccagagcacacccggacaaacccacacacaccccagagattggccctggccaccaaacgtggaaagccacttggcttcctagctcaccatggaaacgcgcgtcccaacgctgcaagataccactccacccccactgaccagcaaaagacaaaaacgttgaatgccaagtgttggtgaggtctggggtgacaggaaggctggcacatagctggtgggagcatggtgtatgggcacacatcccccagagagacaacagccactacctggtaacgaacaccgacgcccccgcttccgacccccatgctcctgcagttgcctactgtgctccaccaggagacgggcgctaggatgttcctaacgcactgctcacagcggccagtgagaagcaagctagccgtccaccaccagaagagcagctaaggagaccaggactcggttacaccacaaatcccacacagcagtgagaaagggaggcagggcccacatgtagcaagcacagggcttcaaagagcgtaccaggagacgcagaaagcacggcagcatctgtgatggtgcagggaccaagccagctgccacgtgtcccctcccagatggaagaaccttgcttagcaaccaagggcacagcctaggttcaagtcccggttctgatactttctagctgggtctccctgggaagttacttattccatctgtgcctccatttctcctcatctataaaatggggttaaactcataggattttgtgaagatcaaacgagacagtgcatgctaagctctcaggctggtacctgcaggctgaagtgcccagaggtgccagtcacattgccgccatcagggagcagtggctgtgctaatggcacccacctttcacgcctccctgtaaccacccatgaccttgctgtggccagtggaattgctgcacacttagcaaaagcagaggcttgaagatgcgagttcgcatttctgctgtttctgtcaagagaatgagcctagcctggcctgcaggaagcgggcagagaggcaaggagcagcgtggtgcaacccagcctgggctgatctacaacgccggccccccgactccctcgctggccacggaggtgcaagagctgagcccacaccagcagaaatgctcagctgccttccagacaggtgagaaacagtgaacagttgctgcttcaagcctctaaatgtggggctgctttgttccccagcagtagccatgtaaccataccgggtaactgatacaatcatcccccactgtacagaaagaaaaattgagtccttaagaggttacaacatttgcccacagctggtaagagatgagcctgaatgacagcccgcctctcagccccagcgctggaggaaggagtctgctcccctctctgcctgagtctctgtgtgtgtgtgtgtatgtctttctgtctgtctgtctccctctcttcctgtccctctccctctcacacacccatgcacacagcaggagcctcccagggtggccatgggtgactatggtgggaagatcaggtacagagtgtgagtgatcagatggaacagggaaggatggagacgtggagtcctgcagcctcagggcagggctgcagcgacagaagggacacacaagtctcttccctggggatagagctgaacacacctcctgatgacgccggcagagtgggccacccagacccccgcccacccatccccagggaagggcctctgcagctctacagagcctcacagacagtctcggctggtgacaatgtcgcctttccccctgtagccccagatcccctcctagagaattcaccactgggctcgggcaattccaggctcctgctcagctactctcctggggacagagatgtcatcctgcagctgccatgggccatttctccccgtgccgggtcaggctcccctcccaaggttctcagccctgaacagagggcagtttccccaccctgaccctggaagtttgaacaagagggagaagtgggcagaggaacaagagagcccacggtcagactcactgcagaacttcccagtggagggaaggggtgcagtgcagcatccctgcagagggtgcgaatcctcgtctcaggaatggcaaggggccctgtgaagatgcccatgctgtaacccgggcaaccacactggctcctttatgttccccacatgccaatcaaatgcaggccaggtgcaagcggacatcacttaaaggttcgggttttggaaacagataggccccaatttaaatggtgcctcctccctcactagctgtgagcttggacaagtgccctcaacactccagcctcggtttcctcatctggaatatgggtgtaggtcaaagaggacctacttcacggaaattttggatagcccagaaaatttcagacttggtgaaatttggtgtttgtcttgttttggttttaaagatagcaaacagccgaagggggccagaaaggggctggaagcccacagcacgcagccctgggagggcgaggtgggcagaggggacagtgcttctgcggcacagggcgggtgcagaaatgcaggaccggctcccgggggcagcaagagcccggtcagcctccaacccaccaaagccacaggggaggaaggccacttccacttggtggcctcctcccctgccctgtagatagggacacagcccctgcttctcaaggcggccatcggtgaggggcccacaaggcgaaggccccgaaggactgaggatactgtggggtgctgcggcctctaaacaggaactgcccccctgggaggcactcaccagccactccccgaggcccctgaaccccaggagcccaggggaggctctgggcccagagctgcctggaatgccgtgcaccgccatggcaacaggctgaggacagccatcttggaaagcccagaagggagtggggggagggagggacagtgacatgtcctggcaggtgcattgctgaggggacgcagggcccgaggggactccccaacatccccctcatcctctgcagagagggctgcacaaaggcctggcggctcccagcccaggctagccggggtccccacatggggccatgaggcacctccacagccacacaggctggggggcatggctggcccctgtccctcacccccaggccttatcctcccgggagaaatgacccctggggggactcacgccagtgagggaatcgaggcctagatgcgtgtggagcctggggtggtaggggcggcacccaggaggccccaaggtccagctctctcttgctcagcctccgtctcctctaaaatcagaggcacagccactcagagggcagaaagagggcaaaggggagcaggtgccagacgcagggcgcaggcagagatgaggcatggtggtgactaagaaagccagcaggggccagggaggaggcggcccccctcgggctttgagccagccagcagggccaccaggaagagccagagtcccaggcggcctgagctggcaataaatgaagtgacagccccagccctcaacccgctggtgacaccagcttcttaaaataacgccttggaacaggaaggaagcaatgactcaaagcggcagagaggtcggggctgctgggcacgccctccaccactgcgcccgctcccagcctggtccagtccccacagctgggctggaggggccgtgccccaccatctcagtgcccccgacccctggttagcacctctggtgctattttcatcctttccaatgcaaattcctccaggaaggccacagggatccgtccctgccgaggggaggggcgttggaactgcagcttctgatggaagacaccctgggaactggactctgtgacccacagcacctcaggccgtccctggcccgggcttctggcacccagttggtagacaggaccctgcagagggtgcaccatgcagctgcctctgcttggaggatgcctgtggccactcgggcctggcagatctgtgcagaactggccggccgctctcccaggggctcagcacacctccacgcctcatctcttgctgtgtggcccggcacaaggcactcctctcactgagcctcatccagaaaatgggacggcaacagctctgtgaggcgtcctccctgtccccactgactggcaccaagccaggggccttcaagagtccaaacactagatcttagcctcctgtgccatcagccttgtggaagcctctgctctgagatccccaagtggaagacaaccccgtccccttgtctccaaagaaccagagaagactcactgtggggtccctggttccaaagcttctgacaccagcagctgcccacccccatctgcccacagactcccacggacaggggcttcctcgcctgtgttcctcgggccctaagacacaggccctttcccccaggaggcccccggggaccaatcaggaaacgggagcgggaggacccggaaatctggaaatgcttgggaacttcatccaaccctgccatccctatttggcagaaaaggagaaaccgaggcaagaggcagcttactggtggagatgtaaaatggtacggccacttttcggccactttggaaaacagttgggcagttcctcaaggggctaaacagggttaacagaggatctagcaattccacgcctaggtacacacccaggagaaatgaagacgtacgttcacatggaaacggcacactaatgttcacagcaactttattcacaataccccaaatatgcaaacaatctcacgtccaccgactgatgagtgggtaaacaacacgtgacctacccctacagtgaaatatgattcagccacaaaaaggaacgaaggaccgacccacgctcgacacggatgaacctcgaaaacatgatgctgagtgagagaaaccagacacaaaggaccacatattgcaagattccatttataggaaatgtccagaataggcaaatccatagagacagaagggtttctttttgagatgatggaatgttctaaaattgaccgtggtgacagttgcacacatctgtgaatacactaaaacccactgaactggacactttgagtgaatggcatgcgtgtgaattgtacctcaataaagctgtttacaaaacaaaaaaacaagcaagcagcagctgctgctgctgaaaacttccccagatatcacttccactgagagaagcacgaccctaggccagagctcaccacccagatcgcccaggcccgaggatgtgcctggagggggcagagccctgaaggggtgggggagcccagcgaggttcctgagtccagccaggtgggcagctgggccctgcttctgagctggaggagcccttgccatctcctccctgcttctgccttctgagtgggcctgggagcccggggcttgtagttcctgagtggcctcaaaagacggaccccgggctttggggagctctcactgcaaaactgagcagcctgcagaaacttcagggggagcagctcatcaccaaattgttcacaactactgagcgcttcgtagggaccaggagctgcactaggtgagcctttaacaggcagcactgcctttaaccctgggaagaccctggaaggaggccctagagcctccgcctgtcccagatgagagagcactgtggtactgggaggtcagcccctttcctaaggccacttggcaaacatgcagtggagctgagtttagattgaggctctgaaggtgtcagacttctgtttcgtttttttatgaggcagggtctcactctactgcccaggctggagtgcagtggtgtgatcatagctcaccgcagccttgaactccagggctcaagcgatcctcctgcctcagcctcccaagtagctgggacgaaaggcgtgcatcaccacacctggtgaattttttaattttttgcagagacaaggtcttgctatcttgcccaggctgatctcaaattcctggcttcatgcaatcctcctgccttggcctcccatagcactgggattacaggtatgagccactacacatggcgaaggcataagcctttatctgcaccctgggcgcactcacacgcacaccctagcccaccatgcacacagagactctccctcatccggcacacatgtgggtagcatataccttcagtgcccaccacggccatccatgctgaccagctcagtgggcacagatggctgtggggcaggcaggggctgcggcccattctctgggggctagggcttctgcatccacccatcctcagcccagggactccaggaggcctggggcctgctttccagctctgctgctgacatggcatctttccgcagcaaaaggacactagtgacagccatcatcgccatcatcgccatcatcatcatcatcatcatcatagctaatgcccagcacttactgtttacaaggcaggcgcggcacccgatgttggaaaaatattaacacagctcctcctcactgtaatccagtggaataggtgctgttaggattcccattttacagatgaggaaactgaagcacagggagggtaacagacccgctcagggtcacaccgccatgaagcggtgcacctgggagtggaccgagattgtgtgacccagagaaccggctctccgcgctcagctggagcaagcgcaccggcctacggatgtgtgactctcctcacagcccgagcggccgggcttcacggtatgcacaggagtgcgcaggtggccccggaggcgctcgctgccaagactccccacccccacccagcccagccaggcccgcccacccgctatctgccgtcctctcatcaggaaggtgggtttcctgcttcctccgcggacgccgcctgggcagcgcttggtaatagatgacttcctcctccgccgcaccctcccgcctccctgcccacctctccagccacccccgccctcccctgagcccctgaccctgtaccccagctcaccagctccacctggggccccaggccttccagaatccgatgtgcagcttcagccttcttctgcagggtgatggcgaagaggaggaatttttttaaaaaacaaaaaaacacagattataaatagaggcttcccggagcagcgggcacctgcccagcccagtccagcatgctgatcctcagcacgggggagggaggcccggggccccctgcaggccctccccacgctggaaaaaaacacagaggagcctcaatacccccacagcggccccagcaagccagccaagtttcgattttagcaaatgcgccgggtccactgaagcctgctccccggcaggcgcgcaggcctcgctcccccagggcccagcgacgtgggcaccgctccccaccagcccagccgacactgccagccctgagatgccttccctcaccctggaagctggttgggttgtctacaattacctcagagctagtgcagccagcgagggaaggaggaggaggaggaggagggagggtgagatagaggcgctcggagataccctttctaggattcttgtgtttcacaatcatgtgattatttctgggctgccccggggcctccccgcctcctccccactcacaactggggacttattaggaaaacaggaacatgtggcgcagggctcggtggccgctccatcaataggctggacctccgggcccccaccccggccctcggtgtgaaggcagacattgtgcctcggccaggcccaccagcccgcagcctgggaccaccagggtccactcacaggaggcctggagggcagcccaggccagccgggtacagggaggtggggggcggaggggctcctgaaggtggcttcatgggggctgtggcggagggcaggggcagaatttgcgtgggtttgggtgccccctgcaccaggctaaactgcgtgtgtgctggcaaatgggtgttcacaggctggcacgcgggcgagcccctgctgtgactcagctgcattggggcagccactcagtatttggcaaggactaggcggacaggccgcagaagtcaccatcaccatactgaaactgtccccagtgaccccaaaccagattggccaaaaggaggtgaccccaagccctgggaaatgtggctgccaacaaaaatttgacgcagcctttgccaagatctcctcgcagggcggaggtgcccaggctcccgggctgcagcagagagaggagggcgtggcaggccagcatcactccccctccccagcccccggagaaagacagcaggtatgtaggtgggctcaagctggaacctagagctgcctccgcctacagcccagagcccggcccaccaagagcagagccatgctcttggccaccttcaggctgagccaaaaccccgagacctgcagcctcaaggtgcggctgggggccagaagagcaggggagaactattacagcgatggtcacttctccaagcacctgccatgagccaagcgtcgggcatacggtgtgttcttaacatgtcaattgcgcataagcgccatgggaggtacaggcaggagtagccccatctcacagatggtgaaactgaggcacagaaacaaaacacagggaagaagcccttcttatgacctccaggatccacggacagaggaagccaagggccaggtcccatgcaggaccacccctaggcttgggactagtatttccggtggatgggggcagacatcacccggagagtcaatgtcccagccacaccctcgaagcaggaaagagtctgccctggggtactgaagatgggagaacccctaagccaggcccagtgaaggactgggtatggggtagcatgggggcagggcagctcccaaacactgggacctggggagagacatggaatgaatgagacctggcccctgcctggaataaacccaaacaatggctgttggttaagagcagtaacagcagattagtatgctcaggcagataaaggtatgtgtgaaagtggggcacaagtcactctcccaaaaaggtaacaggagggctatataggctgggttttgagggatgaataggagtttgtgtatgatctgtggggatcagcagcaactgtccatctagataaaagagtgataccaacggaaagggccaagccactagaaactacacggccacacagctagcacctagagagcaaggaagaccccttcttcacctgccaaagccacagggagccccacctcctcctgtctctctggggtgtttccttcacctcctgcccccacatcccctgctcccagtgttgggtttgttcctgctccacggtcttctctggtcctgcttgtcagcctcctggggaggtgggcctgtggagccctgtcccaagatgggctggcctttctcaacacacctgcccaacatctgggagtcggctgtgctctaaccctcagcaatctgagtctcctgactgagtctggcctcagtctccccattcacgaaacggccacactcacccagggtaccaaactcccatgacctctgcaaggacgttctgcagggagcaaagtgaagtgcatgtcatcccttccctctttgaatgcagaggagataccctctagaacgtggcatggctggggaacgtggacgcaggccacagattcagcctcatgccaaaaattccccctcacctcctcggctgctgtcttcctgccaccctgagcaccaaatccaaactcctcgccagggtcaacagggtcccagccctcacaggaccttgacctctgctggcccctcactgtcccctgcacactgaaagccactactgcctctgagcctttgcacctaccgttccctgcctggaatgctgttccccacatcttcacatgctctcgcctgcctcttgctcatgtcttgactcagcctcccctccccacagaggccttccctgaccccccgcagcagggcggtccacctccctcgaccactcgttttcccacctggctgtcttcacagcacatgcggtcagggataagggtctgcgtcccactgtttatcttactggccacctcccctgatgaggactccatgaggagcaaggtgcctgctctgttctctgctgcacccacagtgcctggacagtgtctggctcacagtggatgctcaggaatggtctaaatacctggaaatggagtgcggctggctccctcgctcaggcggtctctggggcaaagcattcttgtacctgcaggctgtccggtcccagcccagaaccctgtcctctctccacgtcgctgcagctggcccagggcctccctgcctctccaccaggaccagaagaggccagcgctggccaccaagctgctatcgtccagcagggcccagcacagggttgagggcagtgggcactttctccagggccatgggggaagcagtccacatcccggatgtgcctggcctttccaaggacacggagtcctctctgccccctccatagaggtggatgagagggcaggccctgtctccctgctctccaagccacaatcaggattgccaagcctcccagtaacctgtttctggggtgcaggggctgccccattttacagatggggaaactgaggctcggagaggacacttggataggaggtcaccaatccacacagttctaggcaaaatcccaaacccttcccacctgaacctctcccatctagaacattccccaaccccaatattcccgtggctgatatctccacatctcctcggcccctttgggggccacctcccgacactgtctccctggctgcccctggtcctggcaaacagcaagtgctccaacaggagctcctgtctgcatcttccccatgcgggcccaaggcccagcttgcaggggacgccaggacacacttgttagagctgaactaactccacccaagggtggcaaaactcagggactgctccggcccaaaggagggcttcaggctgggctgccaccttccggctgggaggctggaattcaggggactcagccccaacctgggggagaagggaaacaggcctttctcaatcccgctgaaacccgactgcccccacgcacgtcctcccacgttcctggcctttgggggccgaggtctctgctctgatcgtggtgggtggggctgacgccgcaggggaggtggccaagcctgagagaagccactgcccaagctcacctggctctgagaggaaaggaaaacctagggactcaagccaatgagcggccccgctcaccgtggcgtccaccccctgtaggggctctcgccagccaactgagatccgggcacgttctcattcgagcagtggcacccctgcagagactctgggtctgcgtggccaggcctcccatgcccaaaaagcctaggagctgtgctggggcacacaagtccttagtcacctatgcagacgggtccacgggagcaccagacccacgttaccaagtgcacatgccaagatctaggaacacgcaaagacatacacacatgtccacacacatcaaggcgcacgcacatacacatgtgcacccaagtgaacacatgatgtaaccacacccgccccacacccgccatctcacgcacatccacctgtacacacatgcacacagcctaacgtgtacccatgtgaacacatgcgtatgcacacaggtgcacagatgcacgaatacctatatacatgcctcacatgtgccaattcgtggatgaatgttcacgcatgtgcacacagcacccacaggtatacctgcacacatacacgcacccacgtgtgtatgcatggatgtgtaagtgcacagataaccacaggccccacatgctgactcatatacgcttatacacatgtgcacacagccatccagaggtccacacatacacacatgcccgcatacacacacccaagtgtgctgtatcaatgcacgaatcaccacatgctcgtcccacacaagctgactcttactctaagtattcacatacaagtatgcacagccatccaaaggcacacgtgtatctaacacacataccacacatacatccacccgtatacacacgtgtacccacaggcacacaaaccacacatacatccacatgcggctctcctctagagcacagaaacagacctgacactcatcactccctagcctctcccctgcctggaagccccatcctagccccttctctgccacactggcttcctcatctgcagattgggggcagcacctactcacccaagaagccccaagcccccagtcctgcacccaagcccctccgctggctgcagcagtgcctcagggcaacggcctacccggagcttcagcttcctcatctgcaaacagagccccatgcccatgagccccgtgcagagctctcccagggtgggtgacgagcaggaaaagcggcaggtcagaggacgcgtgcagcagcctcgcggggctgaaacggacaatctgaaagaacccctggaccctgggggcagttttgatgaccaggtggccgggcatggaggccagaggtgggggcctggcccaggatgctgaggccacaggacggggtctgaagcactgctctgaaaatcttcaatcaggggatctgatgctgggccctacaaacaagcatgaggagtgccaaaacccccaaaaggctctactgaatgcttcacgttcacggtgactgttaatggtattattcttctttgccctgctcagtcccgatcacactgtgcacacactgagtcctaatcacatcatataaacactttccttttaagacgcttaaactggaagacaaggacctgagtcttctgctgatttccgcattactcagcaactggggttgccgcttccatcaatcctgcctcctctccaccttgtgaatgagccatctacatctctattggaagcagccttctacctttccccagtcgacctagctcaaggcccgtctcctctatgaagcccatcctgactgttccccagtgtcctgaattcctacggtaccagcaacctgtgctgcacaaatgccccttatgtatccacacatcgctagcgctgcctctgtgtatgttttatccagattccaagtgcgtgccttgtcccggaaccaacaggctcctacctcgtgcccaccacctttgaagatcaaaggagacgccagtcccctctctgggacttggcctgtgccatgccccctcaccctaacgccctccttccggcccacccgctgcctccaagaagcctttcccagcacccacttccaggtcacgcttctgccctcctgggcccaggccaccccgtctgctcctgctctcaggctgcagccaccctgatggctgccctgccatctgtgcacacctgcccggcccccacccacgcaggcagctcccaggaggcggggaggcgggaaaagcctcgctcagcgggtgcctcaccaatgtgctccgaatggataatgagccagactccagcactcagaactgccaggcgggccctgcccggcagggaagctgcgttttccggctggctcgaaaaacagacccttgtcctccatctctccaggaaccagcagggaaggaaggcggattaaaatttaatcctactgatcccccaaggggcggtaagtcctggctgctcctgccaaaggcggctgggggcctcccgcacattaggctgcaggctttggaggctcagagactcagcccgggcggaggatccccaccagcccccacgcccccaaaccagaggcctcttccacaggccagagctggccacccgcctccatctcccctcccttcctgccgcctgaatatttgcacaataattatttaatgtgcatctgccgtgtggtgagcactgttttaggtgctggagatgccactggaaataaaagtgggcaggaataaaatccctgcccttacggagtttccattcataataaacagaataaataagtaaaacagaaatcatgtcccatggggacaagggctaaggagaatcagaagccacaaaggaggaaaacgggtgtcatcctgaaaactccttttcctgaaaaaagggttttcagtattaagtagagggttgaaacgggtcttgctgagaaggggccacttcagcaaagagggaagtgacagtatgagccttgcaaggagaggagctccaggcagagggccaaggcactgcagcaatgtgctgggccactgacctggcctccacagctgctggagagaaccgtgtctgctctccaccgaggatcagagagggcaggtagaggtgacactctcaggagccctgcccatgtcccctccactttgggctcctggagccatctcaatcttggctccaagtcccaggctcaaagctcacttgctctgcaatctcagggaggtctccttccctctctgagctttggtttcttgatgagcaaaattgagagaataacagtagttctactaaatgcaaatagtattctattaaatgcacaaggtaaacaaacacaagaagaaatgagagctatgataatgacaattaatagcaccagctggcacttctttggtgccagacactgtctgtcctaagggcactaggaaattacccctttagtccccacaccaactgtactaggtgatgccgtcgttgtcattgttttaaagctgtggagcatgaggcacaggaaggtttaagtacaacgctccagggtcacagagccaggaagtgggagaaatgggatttgaacccaggatggctggctgaaggatgtgtggccccttggctctcctatgactgttactagtggtgcttggggtgaggggtcagggtgtgggagagtgagccgggcacacagttcccaggccccaaacaggcttgtctcattctgcatgacatcgctgtttctagaggtggaggcatagccaaacaggttgatccagtagttccctgcctcaggctgccactgcaggcacccaccacgtgactcgaggcctccccacccccacctcaactctgagcactgattggccaaggaagatattacagaaaaggcagctgggaagggtggctgggactacaggcaggaggggaaccagagaagccaaggcagggagaggaggttcctcatctgtcatgcttcacaaggaccagtccctctctgggcctcagtttcctcatccagaaaataagggaggggatcaacatccacagatcctgagtacatttagaaaaagtacactgtaaatcattaaagcccagctggtagtggcttgactgggaagatggggagcttaccacctcaccagacacaaggttccaccttgggggtgcacagacccttagggtccagcccctggagacactgctctgagcatcccaagcccctccagcaagaccagacccactatagctgcccccagtgggatctccatgggcctccacagcctgctccagactctgtgtttcaatcatctcaaaggccccttccagggcccagtgtcagtggaagccagtgctgagaactcaggccctgtggtctgacagcccacaggttcaaatccaggtccaatgcttcctagctgtgtgactctggacaagtcacttaacctctctgggccttaggaaaatggaaatgacacctgtacctgcccttccaggactgacaggaggggctgctccatgaaacctcactgctgcggtcataatgtcattatcttttgccttaaagggatttcttctgcaccagcacctaaagtggcagccccttacccttggccatcagctggaccctggtgctctcctggagcccaaaacctctgttttgtgttgcatcctgctgaccagccacagtccacacccatctgagtgtctgagcagaacagcccagaggccacaccaggatggctttccaccggtcaccttcccccacccactcataaaccctgcgtctctgggggagagggtggcgaggtcccctccccacatagatggaaacactgaggcctgattcatggtgccccctgtgaagcgcctcatggccagcaccggggggcagcaggccagggcggggacacatacccggttctcgtcgtagatgatctgcaccaggctgcggtgcttcgactcgatgggcggcggtgacacgggcttctcaggctcgggcggcttggcagcctcctcctccagctgttgctgtggggagaggcagaacgtgagggatgagcaccccagcgggcggaaggagggctgcagcccccagggcgcggggaggcccccttgcagcccgggccacggccgcgcacaggaagtcaggctgctacacatttcctgtgagtcaccccagggactccgcacccgggagaggccccagctccagggccagctgcagcctccaagctccaaagccaggttcaaatcctgccttcgtgacttgccagccagggaagcacagccaagcagcctcaccctgctagccctcagttgccccatcagtaaacggggctgattgccgtgccgccattctgactgtggtgagaactgaatgagttacacaggcaggcacagtcaggcctgctgcgagccggcattattacccattacggttcctacaggcagcatcagtgctaggagaggctgtgcagactccacagctgcactggtgagactggagcccaactcccactcctacttactgcgtagccttgagaagctcctggacctctctaagccttaccttcctcttctggaaaatggggataaaagagttactactctagagagccgttgtgaaggtgaaatgagctcatgatgcgtgcaaagcacgcagcacctgacacacaggtgctcctcatcaaccccatcatcctcatcctcatcacccccatcatcctcatcctcatcacccccatcatcctcatcctcactacccccatcatcctcatcctcactacccccatgatcctcatcctcatcacccccatcatcttcatcctcatcaccctcatcatcctcgtcatcctcatgaccaccatcaccctcatcctcatcacccccatcatcctcttcctcatcaccccatcacctgcatcctcatcaccctgctcgtcctcatcctcatcactgtcatcctcatcacccccctcatcttcatccccatcacccccattatcctcatcctcatcaccccatcaccctcatcctcatcaccctcatcctcatcacccccatcatcctcatcctcatcaccccatcatcctcattctcatcacccccatcaccctcatcctcatcacccccatcatcctcatcctcatcacccccatcatcctcatcctcatcaccccatcatcctcatcctcatcaccccatcatcctcatcctcatcacccccatcaccctcatcctcatcacccccatcatcctcatcctcatcacccccatcaccctcatcctcatcacccccatcgtcctcatcctcatcactgtcatcctcatccctcccctcatcttcatcctcattacccccctcatcttcatcatcttcaccccatcatccttatcttcatcaccccatcacccttatcatcctcatgacctccatcatccttatcaccctcatcatcctcatcaccctcatcctcatcaccccatcaccctcatcttcatcacccccatcaccctcatcatccttatcctcatcacccccatcatcctcatccttatcacccccatcaccctcatcctcatcaccccttcatcctcatcctcatcacccccatcaccctcatcctcatcaccctcttcaccctcatcctcatcaccctcatccttatcacccccctcatcctcatcacccccctcatcctcatcaccccctcatcctcatcctcatcaccccatcatcctcatcaccctcatcctcatcacgcccatcaccctcatcatcctcatcaccctcatcatcctcatcctcctcacccccatcatcctcatccttatcacccccatcaccctcatcctcatcaccccttcatcctcatcctcatcaccatcaccctcatcctcatcaccctcttcaccctcatcctcatcaccctcatccttatcacccccctcatcctcatcacccccctcatcctcatcacccccctcatcctcatcctcatcacccccatcatcctcatcaccctcatcctcatcacgcccatcaccctcatcatcctcatcaccctcatcatcctcatcctcctcacccccatcatcctcatcctcatcacccccatcatcctcatcctcatcaccctcatcatcctcatcctcatcaccccatcatcctcatcctcatcacccccatcatcctcatcctcatcacccccatcatcctcatcctcatcaccccatcaccctcatcctcatcacccccatcatcctcatcctcatcaccccatcaccctcatcctcatcacccccatcatcctcatcctcatcacccccatcaccctcatcctcatcaccctcttcaccctcatcctcatcaccctcttcaccctcatcctcatcaccctcatccttatcacccccctcatcctcatcacccccctcatcctcatcaccccctcatcctcatcctcatcacccccatcatcctcatcaccctcatcctcatcacgcccatcaccctcatcatcctcatcaccctcatcatcctcatcctcatcacccccatcatcctcatcctcatcaccccatcatcctcatcctcatcaccccatcatcctcatactcatcacccccatcatcctcatcctcatcaccccatcatcctcatcctcatcacccccatcatcctcatcacccccatcaccctcatcctcatcacccccatcaccctcatcctcatcacccccatcatcctcatcctcatctgtccatgtatgaaccccctcctcctaacacagttggaaagagcatcccatcatgctgccgtctgcttcatagcaagagggaggctgaagaccagagggtttagggcactggcccaaggtcagatggaaggccaatgccccattctgcaatgtgacagggcatcacaagtgagatcagaacatggttctgctccacttatgacgctcgcacagcctgcacattaccacagagcagatcagtatgaacccagaaaggtgcccaagaagaagtgaacacaggaaaagccagaaaatccaggatgctggcttttacagactccatcgctggcggtttgagcagaactgcctcagtcccacagcgacccctggtggtcgcttcaagaagggcatcaaaatgctcccccaaagcacggaacaaacaaagccaagaaggggaagaagcccacagccccgaaagggtgggcaggagggaggctccctccagccagggaaggtggcccttcctcaggtactagagaaaatactacctgggacacctacagagacccagctaagagggtgactagctctgctgggcctggattcaagcctgagccccccgctcaccagctctgcagcctcagccagggcccttcacctccctgacctcagtgtctacttcagcagaacctgtgggtatatgcctacctcataaggttgtttggaagatcaaggagataatgctgaaaaaactgctgcacagcagtgacacgctataaagggctctctaatgcaaatcaaaaccacaatgagataccgctgtacaaccactaggatggctggaatcaaaaacattttttaaaggaagataaaaaagggttggtgtggctagggacagtggctcacacctgaaatcccagcactttgagaggccaaggtgggcagatcactcaagaccagcagtttgagaccagcttgggcaacatggtgaaaccccatctctacaaaaaacacaaaaattagctcggtgtggtgatgcacacctgtactcccagctactcagaaggctgaggtagaaggatcgcttgagcccaggaggtagaggctccagtgagccaagatggcaccactgcactccagcctgggcaacagagtgagaatccatctcagaaaaaaaaaaaaaaaaagctggggggcggtcggtgaggatgtggaaaaccaggaaaccaggaatcttcatgcattgctggtaagaatgtaaaatggggcagctgatgtggaaaacagcctggaaagtcatcagcaaattaaacctagagttactgtacgacacgacccagcaattctgctcctaggtatacacccatgagaactgaaaacaggtgtcccaacaaaaacttcaacacaaatgttcaacagcagcactattcacaacagccacagcccaaatggccacagatgatgaaataaacaaaaggaggcatctccatacaacggaatatgtttcagccataaaaaggaatgaaggatggagacaagagacaacatgataaactccaaaaccatgacactatgtggaagaagccagaaaggacgcatactgtgtgatgccctatataggaaatgtctagaacaggtcagtccatagagacagagagtaggggaacggggagtggctgctttagctcctatgaggcttccctgtgggttgttgaaatggctgggaaccagagagaggtgacagctgcacaacactgcaaatgtacgaaatgccactgaattgtgcactttaaaataattatgcttgagaatttcacttttaaaaaatgccaaagtggaatttagaggggaaaaaacaaacaaacaaaaacctaaccattgagggctgccttgagccacctggcttccagctgcagtcaccaatgtgtgccagtgacccgcagcttcagccccaccccaaggccaggcctggaagcctaacggtgcggtaccaggctggccctggcaatgcctgcccacgccgctggggcccggcccctctcgggatgcctgtgccaccaacatgagacctacccactgcccactgaagcctaggacagttggcagagtctccaggaccgggtctcactgctggactatcctcaaatcctggttcccccaaccacgtgacagccacgatggacacttgaaatcaatgctctccccctggagcgtccttcaaaacccagctaccagggcacctcttcctggaagcctactctcaccagccttcacccacctgcctacagtggctaaaatgagcccttgatcctccttggagcccctacttccttgtctggagggcactagatatgagcctgtttctcccattagtctagacgctccctggggcccagacagtgtcacaatgactcaatcaaccatttttaatgagcacctactatgtaccccatgctgctcagaacacagcagttaacagggagacaaggagaggaccactgtataacaaagctgggtctatattaattcaaataatgatgtcaccagcagggtgatgagacagatcagtgatcagcaaaatttctttttgttgagatagagtctcactctgttgcccaggcaagagtgcagtggcaatcatggctcatgcagcctaaacctcctgggctcaggcactcctgcctcagcctcctgagtagctgtgaccacaggcatgtgcctccacacctggctaatgttttaaattatttgtagagacagggtctcgctatgttgcccacgctggtctcaaactcccgggctcaagtgatcctccagcctcagcctcccaaagtgctgggattacaggcatcagccaccatgcccagcccaaagcttttctttaaaggcctaaacagcaaatatttttgactttgcaggccacacaggtctctgttgtgatgacttaactctgccactgtggcagaaaagcagtcatataaacacacatgtgtatacagatacacaaacaagtggtcgtggctgtgccaataaaactttatttacaaaaaccagcagcagctagaattggctggattggctgaacccgggatagaggagggttgggggtgtgtgttcctgtacaaggctgacagtggcctcttggtgtcagggacatctgagcagagacctgaatgataccagggagcaaaccatgaagagctgggaaaaggcagattatcaaagaattgtatattaactcatatttaaaacaaagttataaaatgaatgttataaatatttatatcagctttttctccgcttgtctttgtgtggtttcaacagtgacaatgaggatttatttttaatctcgggatcttgctccctcctctacaagttgtccattttacaggcaaggaaaccaaggctccaagagatgaaggttccagggccacacagctagtaaagagcagttaggaggccagtccattcagattccagagccaggggctgtttccccacattacagataaggaaagtgaagcacagagaagggactgcccaccccacgttgcctggtactggaagaaacaggatctgaacctggacagactggctagaaatcctgaactttcaccctccattcttgtgctgtctaatgcggcagcctgtgtggctattcaaaggcacatttaatacgtatattaaataaaaattaaaaatcagttcctcagtcgcagtaggcacatttcaaatgctcaacagtggaacatggctatcctgcagatacacagtgtttccatcatggcagaaagttctgtggatgtgctcctgtccaataaacgtaaagggcataaaaaccagtgagcacccaggaacttgggaagggcttggcacatgtctgtgacaccgctgtcactgctgctagaatggagactcagaacaaacactccccctccccctgcccattcacacctgcttcttcttcagcttagagatctgctgctctaccatggtgatctctcggtccacgcggtccatgttctggatcagctcctccttggacagccgtggcggcaccagctccagctcagggtcagtgtgcggggggctggggggagacaccggttccagcttgcccgtcaggctacggtcctgtggcagaaaaaaaacgggcatggggtcagcacaggggacaccccccagtctgtacaaccctgtgatggttaatactgtcaacctgattggattgaaggaggcaaagtattgatcctcggtatgtctgtgagggtgttgccaaaggagattaacatttgagtcagtgggctggagaaggcagacccacccttaatctgtgtaggcaccatctaatcagctgccagcgaatataaagcagacagaaaaatgtgcaaaggcgagactggcctagcctcccagcctacatctttctcccgtgctggatgcttcctgccctcgaacatcacactccaagttcttcaagctttgggactcagactggcttccttgcttctcagcctgcagatggcctgttgtgggaccttgtgatcgtgtgagttaatactccttaataaactcccctttatgtaatatatatatatattttttctattagttctgtccctctagagaaccctgactaatgtagttgccaactttttgcctgctgccatccatgtaagatgtgacttgctcctctttgccctccgccatgattgtgagccctccacagccacatggaactgtgagtacaattaaacctctttcttttttaaattgaccagtcttgggtatgtctttatcagcagcatgaaaacggactaatacacaccccctccccaatacaccccgggtttccatccctgactccaggcccagagtcctggacatctgtcaggacagtcctcacctgttcaaggatcccattcccatcccagccatcacccattctccaaaattcagagtcccttacagccttcaagatgcggttcaaatgctcttgctacatgaatggtttcccagcctctcctcaagttgtgaagtcttccaactccctgttcgcgtaacacacctctcttcttccacttaccccatctgtgtgttccccaccagcccaaggaacgaagacccacagcctccattctcccaaggcctggcctctgcataccctctgtaaacattcatccatgaagctcagtccaaacacgcaagttccagaaccatgcagccaacacacacgtggctttgcagaaaacatatgttcccaaacacacggaaaagccatcagaacgggctacagttaagctaaaaggagttatctcggcagcagggcagaagagggtatttttactttcttctttttatttgcccgttattttttctgatcttctttcactgagagtcactctttgtgtaatacagctgttttgaaaatgtgcttaacaacaaaggaagcctgcattcagttatccatggacgccttcatcccaccagctaaagtctggtgcacccaggctgtgctggaaacactctcaggataaggaggttagaaaaaacaacccaggcctcacctgtgcagccctgggttcaaatcccagccccctctgccactctccagttccgtgacctccagcaggtcattcaactgcttcctgcctcagttcctcatctgcccaatggggagaacagctggcacctccccggtccttgtgagtcttgaatgagttaatggctctgagcctggcataccgtaagcctcaataaatgttggctgggatggtcctcccctagctgggctccagaacccagcccccgccctgtgccatccttggggccaagccggcagctgctggcagacaaggcccagagcagcgccaggccaccacctccccgcccccgcagcagctgcacccagaggacacagggtgcattattctccggacaactgcagcccgggggccaccgagtgccccaccaacctcaggattcacagaggctgcatcatcttctgtccactcctgccatcctcagggcctctgtcctcccctcaccccacagagccccagcaagacccacaggggccaagagtcttggagtcacattaggtttgcctctggcctctgttaccatgtgagatgtgggggcaaggacagcaggggcctggacaacccggtgctccctccacacacacggactcctcgagggaaacagagaaaagggctcatatccctcaatcgccccaatgcagtcctccatgctcctcaggccacctcccccagggacacctagaaatcacacctggggccgctcacagctcagcctatcccagtcctctgcacaccccatgaagtcctctgcacaccccatgaagtggatcccacaacagccctccgaggggactgctgctccatctccattacgcagaggcagaaacagagcctggaggccactggggctggatgccagaggccggcactttcctataaagggccagatggtaaaaatagctcaagctttgagggccacaaggtctctgtctcatctactcacccctgccattgtattgcaaaagcagccacaggcaacggggaacaaatgggcatggctgtgtgccaataaaactttatttacaaaaacacactgagggccagatttggagcttgctggagtttgctggcctcctgctctaagcaattcacaaatcttaatccacgtaaccgtcataaccaccgtgggaagtgggatttctgtttgacgacatgcccaaggccactcagcatcctaccttggaaggtgcttgaagggggaggctgcaggggctcccacgtcagaaatggccacacatctgttcaccccacagaaccgtggggctgagccatgtggggactccacgtggggtcccagccacacatccgttcaccccacagaaccatagggctgagcataagcgccaaagcagcaccccttccagggacccagagtgcaggacctccagaaactcaaggcaaaagtgtgtgtggaagaaaaactccctagaaaaagcctcaggagtgtgtatgcacgtaccagtgggtgtggggccctcactgctccccaacaggaaggcaggcagggggccatgggcatctgaccccacccacagcaaaccatggacagctcatgcgtctggcacccccgggcctttgcacaggctggctccgctacccagagtgcccaacaccccttctgtgccaactgacgtgagacatccccacgccaccgcccaggccctcactgcggtccaccttgggtgcttggctggtctctccctacagcccatgtcatttcttgaggttcttaagacaaaaggtggcagcaaacatggcacccagagcccggtcgcactactggtggcaagaaacatctccgctatcctatctctgctcttccacctggaccaagaagagagataacagagcaaggacaaggatgtggaaggaagggctatgggggccaggccaccctaaaactctgagagcaaactgctcgtccaacctgggaataattctccaaagcaacattaacaaaaagaagatttccatccccagggctaacaggcagcaccaggagtaaaagcagcggctggcaaccactagcaacacttggaaaagttgctgaaaacttacttcctttaaactctccatggataaaagccgttgtctttaatgggttcttctttaagttcgggtttagcttttattcgcagcaaaattgcacaagtaagtccatcacctgatgaacagataaataaaacatggcatatccatacaagcaatgtgaagggctggacatggaggccgaggcaggaggattgcttgagcccaggagttcaagaccgcctgggcaacatagcaagaccccatctttattaaaaaaaaaaaaaaaaaaggaatgaagcactgacccaggctacactgtggatgaaccccgagaatatgatgctgagtggaagtggacagacataaaaggctgcagagtgtacaattccacttacaagaaatgtccagaataggcaaatccagagagatggacagtgattcgtggttgccaggaaaaaggaggagggggaagtggggggtgacatggtttggccgtgtccccacccaaatctcatcttgaattgtagttcccataattcccacatgtcatgggaggggccaagtggaggtcattgaatcatggtggcggtttcccccgtcctgttctcatgatggtgagtgagttctcatgagatctgatggtttataaggggctttccccacttttgctcagcacttcttgctgctgccatgtgaagaaggacgtgtttgcttccccttccaccacgactgtgagtttcctgaggcctctccagccatgcagaactgtgagtcaactaaacctttttctattataaattaccctgtctcgggtatgtctttattagcggtgtaagaacagactaacacagggagtgactgattaatgagtatgggggtctccttttggggtgatgagaatgatctagaactagacaggtgacagctgcacaacattgtaaatgtcctacaagccaacgagctcttcactttaatgtggttacttttttgtgaaccgaccctcaactgaaaaagaagaggcaaacccggattgccaagagcgcttcccctggtgctgggtttcccaggacgggggctgagggagcctggcggtcaggcctgcaggtgcactcctgatgactgtccaccttcccactcacccaaagctgcagggaacaaaacaacaaactaatacaccccgcacaagttgccagggggcagtgggtacctcttactcatcagatgcccctggtgtaaaacttcaagctagcgtgaaagagaaaagtttattatgcaaaactgaagacagagaggcagaaaagcccctgggctcccctgtgccagctccaggaaaaagcagggcccagcttcacgcactcccaatacaccccctactccggccacaatgacaggttctaggacaggcatgggcccactcatggtgaggaggaaaagcagtttggggctagaaatgcggagaggaggaggaagagttctctctttttgctggccttgaacctggaggaaggcctggagtcaccggcttccttcctgctaacacaccaagaccctgtgaaagatggcagagccaagggatgaaaagggacagggtcctgaggacatcgtgtcacctagatcaagctgttacctgaagctaaccaatgctggacttcagttatgtgagccagaattcatgtttatatttgataggggctgtctgtcccccttagggattttcagagatagtgctatttgtgacaattctaaagtccccaaaacaaagttcggtgaattcccaaggaagtctctgatgccacaaaactccggaggctgaagagcagagaagcatcagaaaacaggaacacggtggggcagagggggcacacacagaaaaatcccatcaaattcctgcctcaggcgcccagctgaattccacacagcagatgcagaaaacctctcaactcgctctcccaggcatcttcccttgctcagactttccaaatctcttcacggcctggagcaattactgcggccaggctggtcaggccccagcaccaagctcatcacacctccaccttgtggtccaagcagagaggagagagagacagacacagagacgaagacagacagacagatcgagaaacagaaatggacatagatgaagacagaaacagagacagaaagacagagacgtggtgacagacacacacaaacagaaagagatagagatagagggacacaaagagaaagagatggagaggcagagacacagacagagacagacacagagactaagagagatcccagagggcgcaccacaggcagaggcattcctgacaagaagagggaaagccaggcaggcagaaagaaccacagagcaacggtaagggacggagaccctctagaacccacagagcaacggtaagggatggagaccctccagaacccacaggccagagcgcacggacgtgctggagaggcgggcaggcagcaactcacccctcgggcctgctctctgcgcagagacaaaacgcgcacctgggggacaactgcccactcaggggttggtcaccctccaaggctgggccctgagctgcctgcgcacaaacacatgcacacacacgtgcacatgcacacacacgcacacacaaacacacgcacacatgcatatacacacatgcacactcacgcacatgcacggacacatgcacacacgtgcgcacacaaacacacatacacacgtgcaacacatgcacactcacgcacacacacaaacacgcatggacacacgcacgcacacacaggtacatgcacgcacacaggcacatgtgtgcacacacgcatacacacacacacacaaacacgcagggacacacacaggcacatgcgcgcatacacacgcacatgcgcgcacacgcacacacacacccgcacccacacacaaacgcgcacacacacgcacgcgcgcgcgcatgcacacacacaccctggcctgctatccatccaggccccacttcaggggagttgttcaaatggaaacatctctcccaggaggctgagctaaaattctctcctgccttctgtaacaacaaaacaaaacaaaagaggagaaagcagattccagtgctaatgggggatgccaggcagagggaggagggcaccccaccagggagaccagaggggagacccacagcagcaggtcaacctggaggcaggcatggggtgcactcccagctgcctgggcctgaatcccgttcccccacgtccagctcgctcagcctggggccgtctacaaaagggggtcacagacccagcctccttgggctgggaagagatcagggaatgacactggctgggcatgacttggcacgtggcaggcagtcggcgctcacttaatggcacccgccatcactgcagcattcttaccactgcgtgaatgcctcctgcgtgccagcctcctgataaaggaggtgcctcaccctaggggtcaaccattcaatccaatccggccgcactgggcagaaaaggggaccctgtaggcctgagtggccacttccctccccggggctgtctcccagtccccaccgcccacccctactcccgctgcaggaggaggatggcctttgccctgaggctgctaaggagcttagggtgccccagggctgtgcagggaggggcccgtgtcacagctggccgggcaccaggctacaacaaggattaggatgccacctggccacagccccaccctggcctgggcagtcagacacagctgggtggctgagtgaccctgggggactgaagcctctggggacactgcctgcgattcccccaccagccctgccatcggcatcctctgtggaagctggagagagaacaagcctccagcctggtatgtcctgagctttactgaaaccacagcaaactcccacagcagcaaaccacaggtgcttaatctgtgcacatcctcaccaccgccaccgtctaggttccactttctgtttcaaagaggagtgaaatcaaagggctgtggagggcactggaggcgtggcaggccccaggctggacacacacgtgggaggtgtcgttctccagccaagaaatggccacgggccaagcacccccaggcgcccttgtccggctgtgagttgtgagttcctgcaagggctgactgggctcacaggaccctggactccaggcgagtgggggaaggagggggagcggatgggggtagggggtgggggagcaagggaatgggggaggtgagtggatgggggaggggcaaggccactggtgggagatgatggcaggcagaacccatgggtgaggggcggctgggaggtgagggggaggggcaggtaatgaaggcaaggacagatggccgcaggcagatgggctgggtggcgctgggtggtggctgggagtggctctgtggtagggaggttgccccaggggatgagcagggagagatggcaggagctgaggaagcagggggtgaaggggagtgagcaggacaggggggctgtttgggtggaaagaaagagagggaggaagaaggagggaggaaggtgtagaaggagagaaggaaggggaggaagggcaggaaggatgtgctggaagggttgggcgtcggggcagggatgctggctggggtacccgagggggcagtgcccgagaggaactggcatcgacaccagtcccaagcccagacccaagtgcaggcggcccaagccccaggccacagagacccccttcaaggccggcagggcccctgtggctgaatctcacaccccaggaggacgtggtggggctgcagcctcagccatgagtggcctcgagagtccccacagggctagccacaggtctcccctgccatgcaggccctggagggcagccagggctggaaggagcgaggaaagaggaatgtgcctgggggagggcgctcctgcggagggcacagccggtgcaaaggtccccaggtgggaatgtgcctggcgtgtttgaggaactccagggtggcctgggaggctgtacgtgagcggttgagagggctgctgcagggagatgaggtcagggaggtgacggggctggatcacgccggacctgcagcccatggcaaggattttggctttttcctgcttgagacaggagccatggatggtttggagcacaggggggaacacacagggggatgcagtcgtctgcctttataagagccctctggctgctgcttggaagataaactgaagggagtagagggaggcaggagcagggagacccaggaggaggctactgcaaagttactggagagcaatgacgagctcaggccgggggttgcctcaggtgtgggcagaaggctggaattgagatattttagggcagaggtgtcaggatttgctgatggactggaagtacgcaggagagcagggaggtggccagggtggagtccctgagtgccaacaagaacacagctgcatccgccgggggaggttcctgagtgggctctcaggcgcatgtggtctgttggctaggagttcattaactgacctccactttcctgtgacaacttggtgaggcggggactgccccagtggcagggaggccaagccagccaacgaccacacagacaccccagcccctccctcccctggccccagaggcagccctgtgggtatctggcaggtgtgcaggtgtcggggccacagccactcagagcaggaggggaagcccagccatcccagccccaggacggcacccccacctcctgccagcccaagcccaccccagggatatcccaggttccacgcaggtatcctctctccccgagagaaggccgagtctggcccaggtggcctggccccgcagccagaccaccacccatgccggctcacgggtgccaaatagttcccacgcatggggcccacagccgagccctctacccacatgaccaggtgacaccctgcccacaaggtcccagatcagtgaggaagaaatggggatcagagaggcacaaaggcagcacagctgtggaggtgggggtggtggaaatcgcacctgggtcacctgagggcagatggacggagggccctgggataagtgagtgtgcccaggtgaggcctgggcccacctgcaatgccaggcagccccccatggagatgcagacgagcctgaagttgtctggctcccctgcccaaagtgcatccgtggtccctcaggcctgggtggctgcagactcaacccacgctagcccagtgccacacggtggcccaaggagcagccagactgggcagtagaaggcggctttgtcattctaggggtccaggccatgtcctaaccaagcaccgcccctttagtgctgagccaactctgtctcatctcactttgcgggactctggagtctcccctccctgacccttaagaatccagaagcctcaggtgcctggcagagccctgagctgtccacctcgcgggccggggttcaaggcccagggggctgcctgctgtgcagggctcgaggcaggggtcactgagccccctgttccaagcaagcatggaaccaaacaacccaccctcgaggaagctctcagaatgtgctgaaagctgcccaccgaccacaggacggtcctgacccccatcgaatggcagctctctgctccacggcaccccaggccctcccatcccagctctcccctccctcacgccagctaccccgtgaccacaagcctattcctgccccagggcctttgcacttgctgctctgcccacctggaacaccttccccacttcttcccacactctggcacctccagagacccagcgcctgccctcttcctgccacccagctctgtgcacccggtgcttggcccacctccaagcctttgcccgagctgccccctccctgcacccctacccaccacctcccacccagcccaaccagcagcagaacctcaagcgggagaggagctcccagctgggggcccaggcttaccttggtgaggtcttcagatcccgcaggctggcccgtggccagcaggggtgacggtcgcagcagggggtcaggcagcagctctagccgagggcgcttgctttcaatgaactccatctctgacttccccagctcgggcaggtatgagtgggactctggccgcaggtggagctcctgggacctgcaggaggtgaggcatccaacgtcacataggagattgcggctctgagaactcccgaggccccgaccaccctctgcgccgagcatctactgcgcgccgtgctctgtatgatcctgccaggaaggtgctcacaggagcccacctcccacggtcccacagcagggcaggactccaatgcagcgctgccttccttcaggtccacattcaccgaggacatttacagggagggagtgtgctacggtggcactggaacaccccagagtgactgcccctcccttgctacggaccaccccaccgtccccacctggggctggctacaatgcagaatctccagtaccatctgaggcctactgagtcagactcggcattttaacaagatcattgggtggttcacaggcacagtccatccgggaaacgctgtgagcctaacacagataacagcacccgtgatgccatttccctctcacccacgcagggcagacatcgctggccgatcgcagaactcttgctgctgaacctggcctaaccaccttctcaactcagcctagcagcctggtgcagagactggagctgcccagtttccccagcgactggctctcctgaaccctcctccgcagtgtgcctagagagggcatggccttgcctaactaagcacaccccacggagctgggactcctggcctccacctctgaggctccaaccatcacccaccagaaagagcctgaatatgggccttgctgaaatgcttttcccagaggctaagcagggaatccacagctgttcccctcctgcacaagccctgcctggcctggccctcgctgtcccgccactgcactcctgccccagggcctttgcacctgctgggctctgcctggagcactgagacctcaggccctccatgtgagctcctccccttcctgtcatggtgcagatggcgcctccttgtcccaggccagaccacactacacccgcctgtctgctctctctccactgccctcccacgcgcttggtgacaacaggtgtttcctggccacctcccccacccatgaatgaacgcagggtggttcacctgtcttgttcatggctgtccccaggtactggcgcacagtaggtgttcaatcagtgcctgtagactgactgaatgctgcccactgcagcacgggctggggccgtgttgctggcccccccggggagcggggcagccacccctctgtgctcacctccctggagggccctcaagtccttgtccctccaaagctgggccccaagacatccccctcttcaaggcccagaacccagggcttcaccattacatggggcttggcaggaagcgcatggtgttttctcttaaacatgatagtggcactgcagtggctcaaataatgtcctcccaaaatccacggccactggaacctccaaatataacatcctcccaaaatgcacagccactggaacctcaaaataagaccttctttggacctagggtcattgcagatggaattaagctaagatgaggccatcctggattaggatcactgggatccttgtaacacaacaagagaacacagagacagacaaggaaatggccacgtgagacagaggcagaggcagaggcagagattggaccgatgcagccacagctgaggaacgcctgtagcccccagaagctggaggagacagaaaagcatcctccccttgagccttctgagggggcgcggccctgcggacgccctgacttcagatcacgggaatgcacttctgtggcttgaagccgcccagtttgtggcacgttgcgacggcaggcccaggaaaccaatccaggtacagaaggcacgctgcctcggcctcccctcctccagacgcctgcgcccacctgagttcaccagccccgcctgatctggggccctgggacacctccgtggtaccatgaagggctggggcctggtgcctcgacttctagtcctggctgagtaaacaagagcccatccctcaacctcgcagcctcagctgccccatctgagaaataggcacaattccccacacctcagccgtctccagcagaagctcctagagaagatgggagaaagaacgtggcctaccgatcccaagtgaatgcatggagagctggctctgacccagccctggccctccccttgctgtagtccctccagctccccaccccacctccctcccactccccacctccctctcaccctaccacctaacctgttcattcccttcccacctggatcaaggaaagtaaggctggcccagcacaggcacacaccagagggtgtcctctgccagctggagaagaaggaagaatgggaggagagggcaggggccccaggggcaccaggtgtggactcaaatcttcccacagaagcccagccctgctgcagcccagcttggaggtccccactgctgcctaaacccacagaggccactgaagttccacgctggaagtctgagggccacgtggctcttccctgctcgtcccatcctcaccccgagtcacgcccacgccaggtcaagggtgaacacacggcccgacatcccctcatttcacaggaccctgtgtgctcctgctctgccacgggcctctgcttctccatctgagaaggagctctcacgccctggacagggaggcagcaactctctcctcaccgttcattcccgggctggaactcagacagcagggagggcctccgccgctggggctggatgatggagccgggcgacaggtgggaggcatagtcgcgggagtggtgctggtactccaggagcccgacgtcctgcaggaggggacagaggagtggtgagcgtgggcgggcacgggcatggcggggcacggcagggcacagtgggcaaggccgtggactccctgctcaggctcgctcctgccctaggcagataagcccaagtcctgcagggaacctcagggaccgtctggccagaggctacccttggggccgaacaccaaggaggagaaagaacacagctgaacggccctgggctgcatccttcccacacagcatcccagggacccacgatcacgcccaccttccaaatgagactgccaagcctgggaggtctgatggggctgtctgaggccacaggctaatacaggcctggaaccatcctaaccatggcctctgtctgccggccatgctggcgttgactggggggccagagtagaggaagctgtcttcgcttttctaccctcccaccccatcctacccctgccaggctgtgggtccctccagcctgaggagctgaagcttggaaatgcaggcctgggaagacaggactgaaggtgcatacggggcagcattatttgtaaaaacagaaatgcatttgcagcaacaactgggaaaaggcccaacctagatgcccagctcttggcagggtgggtaagtgatgcccacgcgagggaacgaggctcgggcctcactcgccaggagaaggatggatggtggcaagtgatggcgacaaacacccgacagccagcgaggcccaaagaccaggtttcagaacaaagcgacccctgaccccaaggccgccctgtaaaagaggaactccccgctcgtatcacagccagaagggtaagccttaggcagaccttcctcctttaataacacaccgtcgtccatttgacaaagactctccttgcccacacctgagtcaagctcctctgacccatcctctctctacggggcctcggccttggccttggccttgcggggctctgcccagctgcaggcatcctgctaagtcagtctagaggaaccccccaccctcaagcgctcctcttagtaattttccatccaccgacccctccctccgccctgcggctaggctatgaggccccagctgtcttggccgtatttggcgctgagcctggtctctctcccttatcgtgacagtcttgacgctgatagcacaattgtcctgtacggtcttcctgcttaacaagagtccaaatacttgtttctttaacacattatccattatcatagggggtaaaactcaatatcaacaaattagatgtataccaattgccaagtacacccagatttgagaaacattaaactgtgtttaaaaaaaaaaaaaaaaaaaagacagtaacaagcctctcaaacaaaaacaagacaggcttcacttacgcaccaattccaatagattagttctgtctgcctggaacactcagtgaggctgtttgcggcaatcagttagtgatgtctgacaggtaaggctttagagagtgggattacaagggacttcgtctcttcttggcacctttttttaattttcccaattttccataaaaatctagtcactcttttgttgtctggctttttcaacaaggcagttatttttgcaaagagaatcagagacaatgccaggtgggtgcgttgataatgtatctgttgcagacccaacaaaatcagcacataagagcccgggagcccagaggccaggaaggatgagcaagtggaatccatggggaccctggcagcctcagaagctggaaaagctggggaaaggacctccctggacagtccgatgtagataccaaaagctgcaaggcctccaacagaaggtgtgtctttggccctgttattctaaccctctgagcctcagtttctcctctttgaaatgggtgcccagcccagattaaaggaggcctgcacctcctacactcatctccctcacctctctgagggattcccccaaggctgagagcagcctccagaaggcagaaaaggcacgagcctcctcctgcatcccacagtgtctagcacaagactctaggtgctctcagtgggaggagaagggagaagacggggctggagggagggagtggaggaggccactgggctgacaatgacgcagctgccaggcaaagaccttgccacacacacagaggtgtgagaagaaagcagcaggcctcacagtctgccaggaggatcctctccacccagctctcccataccaaggccaagtgggcagagaagcagggcggacggtccagtccctgggaagagggcctcggcccgatagtgcccacggcagccaaccatggtggaggaggcccgaagtgggggctggggaggcctctgcatgaaccctttggccttcgtttcccaatttaggagatcctcctaggagcatcttgggtgccgtttctgcccaaaatctgtgggcattttgttactggaccctaaaccctgggagacactcggtccacactggcccccaccactaggcttgaagcaggtcaccagggttgagcccagggactcccccaacaagagtacctggaggctctaggggaaggcaagaattggggaggccccaccagagaaactgacctgaggtggagcccaaggggtcccatgagctggaatacgcccaggctggaaaccacctcgccacgtctccaagcaggagagctccccaacgcgacaacattaatcataaaaaacaacaataataccccacagtaataaattgcctttgtgtacctgcagctaaacgctctaaatatattagttaatttcatccctacagcaaccctgtgaggtgggtattacaagaagccccacacaaagacgagaaaacagaggcacagagagggtaagtggcttgtccacgtcacacagcaataaggggtacgttctgagatgcaaggcaaaggctgagctggctttctgaggagggacaagaggggacagtccccaggctctgaacctgtccctgtaggacagcagcaaacctgacttgggcagagggagtctgacccagctgctcagaaagggaggcaggaaaaagccattcaggtgatgccccctggcctcagagggttctccctgaccatggcacctctgaagctggaaatcagggccaccaataaattacacccttaaaactcctgggaaaggtgagaggccaccagaaaaagccattcatccaggagggaatcccagctggtgccttcttggctgggtcccaagggtggggaggagtggctgggggcagagaggagaaaggggctagatgcggggggatgtttgagcatggactgggagaagttcctttgcgggagaggagtgcccctctctggcccctgcatagggctccttactccagaaggtgtcaagggaatgcctgggattgcacactgaaaggaaaggaagaattcagcccgttcctggaccctggattcatgggaaagcaaaggaagaattcagcacattcctagaccctggctgcattcacgggtctctcccggaatgatggcggctacagtcaagagagctcccacctcaggacctttgcacatactgttcctgctgcctggaacattcctcagccagattcccacatgcctggccctctcccttcctccaggttcagctccaaaggcagcttctcagtgaggctcctccccgactctctacttaaatctgggctcccccaacctcagcccttcccctcatctccttcccaactcgccattccccacaaggaggtcagctccctgagacaaggatgcttacctgttctgttcacagctgcactgcaagggcctggaagaggacgggcccgagacgcctgataagtatttgccagatggatggatggatggatggatggatggatggatggatggatggatggatggatctcccagcatgggagctcccaatgaatgaatgaatcttccccagcatgggagctcccaccagcctctcttttgagggccaaaccatccctcaacagcctcttaagagccatcaccaagcaccaggaactgagctgcaagggggccatgaagctaatggagagaccccccccagggcactcaggacactgcaaagcctcccaagtctagcctcttccagtgatccccacgcgcccacctgccccagcctggcccaggcagtctccagggtctgggagccttagcccagggcagtactactccaccaaaggtctgcaacgttgccaactgcaacgaagtgggcacagaacatgacagcatgcagacctctggggttggcgtgaccctggcatccaagggcacaaccaactctgtctgaccctgccggactgggcctggctgagcccctgcgtctgtgcagtgggaccccatatcgatttgtgacaaactggaaatgaaacagaccggtccttcccatagggagtctgataagagctaatctaggccaagaggcagcacactagggcccaaggccaaggcagcagcgtccagtgtcacaggcacaggccacgcccactcccttacaccctggctgagctgctttcacaccatacgggccgcgaagggcggttgcatggcctgcaaagcctgaaatatttacagagaaggttgtgctcacccctgccctaggggcaaagcccaaagtgtacccttggggcaagacagaaaaagctactaaaggcgatgttgtaataatagcatcgtcatcattacattattgattatatcaaatgtctgcttactctgtccataccctgtgcgaaggactctgcacctaccaactaattggatcctcacaatcttaaaactatccttgctcaactgatagggaaactgaggcacgggacggtaaggccacttgccccctgtttcacagctaggacatcactggggcaggatgtaaatgcaagcaacctggctccagaaccggtgctatgaaccagtcttcaatactgcggcatagagaggttaagtaacttgcccaaggccacacagcagaaaagagtcacgctgggattcagactctgtgtccctgcttttaactgcattcctttagcccattcgtttagcccaaggtctggaggagctcaggagtgttcaggggtcccagaggacttgaagaagaaggcagaatgcagctgggccacagaaagcctgaaaggaggccaggagaggaggaggcgttgatctccgggaaaacaaaagctgtgagcattttgttactggaccctcaaccctggagaccctcgcttccccaggaccctcagggagagtcataggatcctgctactgtcacggagagaagctgggcccctgaggatggagagaatgaggcacagagggatgcggcaggtaggaagcgggagggcagggatgatgcatatagaagcctggagcatggctgaggctgagtcagggaacctgggggctttccatggtctcagggtccaggcctctgtctgcaagcacccaactaagtgaagcctcccatttgtgctgggaatcactcaccagcagcccgcagatgacgccagggcagagcacaggcagaggcagcggcttccacggcctgcaccattccaccgccagctcggcatccacggtcctgtggttccccagggggaagaggccctgcttgggtctcctgccacccttccaggaggaaagagatgactaccccgcgcttgctgcgtgcagacattgccaccgatgcacagacccaccaggacaccggtactgcaggtggggaaactgaggccgttccacgtggctgtgagcgggccaatgccactcagcaagctgaacacggagagggttcgaagccacactgaggtctcacaggctccagggaagacctgccatcaaagcagccccgtgcccaaagcaccaggaagaggactctccagacaggaggagctgtcccaggaggtaggcctgtcgggagtatgcgtggaggtgacctgaatctgggaaggtcactgaggcatcccgtggatcccagcagaatggcctcggctactgtacgaggaaccaggacagccaggttcccgccactgactgtccccttacccggggggatctgtctttctgtggcttgatgaggagctcaggaagggggtagtatctttcgaactgggtcttgccctttaaaaggacaggaagggtttgagggctgaggggcttccagggaggggcctccagatcacagcccccagctcacctccaacccacagcaagaaagcggctccaccctgcaatatgcccagggcagcagggccctcctcagagtgcccagaactcttcctcctgcccttcaagagacaagcaggattctctggatgggcagccctaccatgaggcaggagggtccgatatggggcagctcccccagggaggagcacacacaggtggcccctgctgcccccacacaaggacagacatgttctcacctgtggccgccaggctgggccccactcactccctggcctcagcctcctgcctggagggggcggtgagcgcttggccctgtccacccacatcctgcgtcactgacggcccagcaggagaagaatgggaggtgtctagggtcagccagtgaccccgagggcccagttggggcaaagggcaggaggggtgggagagcagaggccacagcagcctgaggactccccaaggctaggagccgggtgagggcggttgagaagagtgggaacctccacaggacaggacaagaaaccagaagccagcagcacccccagggcaggcaggttcccctctgggcagctgcaggtacagcaacaagaccaaggaacggcagcagcaaacggacagagcgggctggccctgagccaggcgccatcttaagaacattcggcatatcccctttacccctcgtgagaatctaggagacaggtactctcagtacccccactttatgggtgacaaaactgaggctcagagaggttacgtaacttgtccagtttcctaccctgtgaaatattttcccattgacaaaatacagagcatgatagtcccactctggggtgatcaggggaatgcacacaaccatatacactcagggctttgaacaacatttgacccatagtaggtgctcagttaacaagagctcttctttttgttggtggtggtgacagataaagacaatgatgacaaaatataaaatcatttcccactgggagtctattccttagccccaggcacgcagtaggtgctcaataaatagaggcacgggggagtggggggacacagaagcttggagccccgatgctgtggcagcctccccacttagggcaatcgcacctgaggcctgtgatttaacctcttgggcctcagtctcctcatctgcgaagtgggatgagagcgtgagctgctctttcacagggccgcccaggagaatgcaatgactctgcccagggaactgccgtcctaagagggatccacaacgcacccactgaggacagctgactctgcaaagcgccccaggggcccaacctacaggaggccactgtgtcagggactcccccaggcagggccagtgagcttatatgcaaaaccttctgctcactgatggaaacgtcctcccacacagcttcctttctggttctcacaagaggggaccacaccagccaggcaggacagacacacacacacacgcacacacgcacccccacggtggccggcagggtcagcttcactccagctgtgacctccaggcctcacatcccctcactcagcagccaggaggtcacaagggggaggcccacaactctgaaagccgcttggcaaacacccagagacatggtatacagcaagcaccccataaatgccaaaggagcgaaaccaaggcccgttgtcctggccacaccatgcagtgagagaagaggcaggaaatggggcccccgctgggaagtggggtggggtggggtgcggcttaggagacccgaccagggcacacatgtgggcaggcagcgaggcccacctgctcccagggcaagccatctgccctggccacagggcgggctccccaaagacacagccagcaccctggaccctcatgtcagggaggcagaaacgcaacctgtgtggggcctcctcacctcagagcctcgagccgcaccaaggtgaatacacacggaacgggaggacaggaaggaaggggagctgtgacctatccggcccccttgccccctggaagccaccccaatcctacccaatactgcggcagcgggggagcagaggtgaggctaggctgcaggaaagtgaatacagcaggagctccacattcgcgtgccaatcccactaccagtccagagagggcagagccccagctcagcctggccccagcctccatcttcccagctttaaaatgggagcaaagagattttatcagatattctggaaaaggcttcagacaccaggggtctctgtggcggcctcccctctgccctgggaggctcagagccacatgagcctggctcccaggagaaaggaaggggtgaagactcagtggaatggaagaagggtctcaaaggtagccccaggcgcacacatgtgcacccccttaccgtgtgcgtccgggcgatctgcactgggtaggaaaggctgtggggcgggtagcggggctcagtggccctccacgtctgtgccacaggctgtgtggatcccgacatggtggtgggggtcggcggggagctgctcccaggccccaataagctttctcttaatcaccaccaaggattaaaagccagtcctcgtcatcagctcacgggccaccccgtcactggcacctgcgggaaaacaagaaaagaaaaacaagatcagccacggggcagctggctcctccgtgcacaggtccccgagtcgttcctgtggtcccgtgaggacacgcgagcacccaggggcctgcctggaccctcctccatccactgccacactcacctgttctccgggagcacaaggagacaggcatggcattcaaggtccctccgagccatgcaagccacgcaagggaccagaggcctcctccccacccaggccttcacccggcaggcacagggactctgcgctgccctcaccaccacccagatggctcccagcccccctaagcccatccaacttcactccatggcccccgggtttctaagtcacagggcagaattcccagaaagcacctgtcccaggaggggcggccggcagcagggacatcacacaccgctgtcccgggcagcagggaccagggccagctcaggcgggccacgggccacaggccacagcatgacctgggcaaggctatgaccctgtgcaggaggctgacaccatgacatgggacaggactgatatgaggttagccagatgcaaactaggaggtgggattaggacatggagggctacaccaggaagagccaagggcagaatgacagccagtcgggccctgcagcctagggataggtaccccaaacggctcctggggcagatactggagccttccacgggagaggatctactcgtggccacgccagaggaataacacgaagcgggctagcagctttacagatggaaaaacagccccacagagaagacacggcccagcaagggagccacggggacccctactccgaagctgcctttgccaggaaacccctaagcaccccccacccccaacaaggcttctccccttcctccgccagccacagctccacgccacctgctgggcttacaacagggtcccatcccagaccaaggccccctccacactctccctgaaccagtccctcagaaaaggtgtgtccatcaggtcctgcctcatgcaaagccctctccagcacccccacaattgcacacaccccccagagctgagggaaatgcaccctggcaccgggacccagcgcctggatgtgggcctccagtggcggaggactgaggctgcaccacacgaggtcaggggtcaggaggggaaacagagcatacccagccctgcaatttcatcagaacaccccctcccccaacctgaagagggtaaccgtccttctccaagcaggaaagcccttggaggcctaatgtggaggggcattgggaggaaggttaaggttgggggccctgactgcctcccaggccccacctcatctctcattagtgtagacttgaccctccctccctccccaggtgccagggatggtcatgtgacccggtcctggccaatcagagtcctgcatgcttctgggccagtgactgtctcaaggatgagcctgtgacccaataggagtcaatgagaatctgccttgagacttttgctgctggaaccaggagaaaggtgctctctgctggggatctaagctgggaatgaaagcctggagctctgggggccaccatgcagcaggagcctgcctgagacccacgcccaccggcaggaaggcagggcgaaagggcggtaagagcaggttgtgtccgatggtggctggaggcaggtcgaagcctgctcacttcattaggggagccagggcactccttctgcacgttttgtctttggcagcccaagctgggtttctgtcacatgccaccaagaattcgggctcacacagggaaagaaggagtcacagaggaggccaccccttcaactggctgctgtccatccttcaaacacagaaaagccaaggaattccggagccaagactgacacatctaccaccacctcggtcctgcctgcgtgggctttcccagccccgagacaggatgtatggcgcaattcccgtgaacatgggaacacgtcccgctccaccatcgctaagctgcgtggccttgggcaagtcacttgccctctctgaacctccaaacacacagtgttccctaaacatcagacattcatgtgccacccccgcgtagggacttttttatagagattacccaggcgacagccgtctagccccgggcctgtcactttcattcagttaggcataactttacatacaagagaagcttattatcagcataggtatacagaaacccagtactatgtggaataaataggaaggcatcggaatcacaaacgcactcccacacacatgaagacgtctgtgcatattccgactgcctaagtcctcctgcaaggaccccaggaaaggccgggtggcggacagcaggcactcagcagctcccagcacacagtaaatgctcagcaaaccagaatgcctaatactgctgtcaccaggactgtcaatgatgcagctgcagcccagtcaccagtgacgctatgatggggaggcaaggcacagctagccctgcccggccccaagagcaatgagacatccgttctgcagccagaaacaagagtctggccctgggagagagaacagctgtggccaccaggacccagccctgttctaaaattcttcctgctagagctcggctcaaagtctgcagaccctggtcatctcatgcagcaaagcaaattctattcccttctctctaggtgctaaacagttcccggtctctcggaggagataaggccgtcacttctgcagggtgctgttcccgaggtctgcccctctttcaagggcaccacgggcaacttccaaattgctattggattttgagttgcacaaggtggccgagaggtctcatttacccacagcttttctttcctcctttgcccagtgagatgctgcctgggggtgacaggcccctggcacacgcttaccatggtgcacacgggcaccagagaccagggagggtgacaccgtcctaaagtgccccgcagctggctggctggctttccactgcctgggatttacacagtgcccaccccggagcatggggctggaacctcggcccctcacctaccaaggggttcccccaccagccccccacccagcgcctcacatgccggtggggcctgaacagggaacaactccagtaacctcgtgccaccctcactcaccacgagcttaggaaacccagtttccaacccctcccgacctgagccacgtttcctgccaactcgaaaaaaaacaaatgttagggaaacggtttggcggttcctcaaaaatttaaacatagaataaccatatgacccaccaattccattcccaggcatccacccaaaagaactggaaacagggactcaaacaaaacacggtatgcatgttcatggcaacagaatttacagcagccaaaaggcagacccagcaaaaattccagtccatccctacgatggagtattactcagccataaagaggaacgaaggacggctgtgtcctacaccacacataaccagaaaatgtcatgctgaaccaaagaggccagacacaaaaggccacgaactgcctgactccacggatatgaaatgtccagaacaggcacatccacgaggcagaaaggagactggtggctaccaggagggcagggtgaggcaggaatgaggcctgctaatggttacagggttttacagggcagtgatgcaaaggttttgaaacttgatagaggaggcgggtgtgcagcactgcgaatagggaaaaaaataagctttgacttttcatcagcaggtttggaagtgaatgccaaaaaaaatgatgacatcatttcctcaaagatgggggcaggagaggacgagggagcccctccagggtctccaggatctggtcctggccaaaggaggttctgaggatggatccgggctggagggggaattcagacacaaacgccccatgtcgccgctgcgtctggctgcggtggggtcagaaagggtgggcggcattcatttatttacatacacactgtggtccctgctgagccccgggctagtgctggggacttcttgtgaacccagcggggtccaggccctggagggtctcaggccaggggctctgcccagccctggggagagccaggagatacgaggaagaagaacttccagagggtgaaggcgaggggatggagagtgctccagctggaggcgccgctgagcaagagcagggaggtgagcgccagctggtggggggtgagcgcaggcttgggggtgagcccccgccaggcggtgagcacaggcccaggggtgagcgagggcctgggggtgagcacaggtgccgtttatgtttgagaaattcattgagtgaatatggggggaagtggggacagagtcattcagggccccatgggcccgggtaaggatggattttgttctcagggcagtggggagccacagaaggtggttgcgggggagagtaaagggtcagtgttttacgagcaggcactggggacagcaagagtggatcagggagacctggggaggctcctgcaaatgtccaagagaggggacactgggggatcagggcaacagcgacagagaaggggaaatgggcaggtggatgaaagtcaggagggaggctgactctgcaggccgaggaaacagctcgctgcaggagtcccgctgcacaggcccgctgcgaggaccctgtgcctgtggcataccgagaggtgcctggggaacagcaggtgctcagccatgcagagtcaggagggtcaggcctccgaggagaacaagacggtgcctgggtgaggtcaagggacttgtagatctcaggtggccgggatacccaacggggacaccaagggcccaagcaggcctctgcacatccaagccaccaaccacagccccagggcccctgctggcccctgaaccagctggaggagggctgcagatcccacgcaggcaggtggaggggctccccatgcacggctgcaggggtctgtccctgggccatgcctgccaggaggtagcaaacacacaagtgccccccgcccccactgcactctgccaggcagcagcagaagccaagtgggccacattccctgttcccggccactgcgggctttggtaaggtttccaaatccacagcggaaagctcaggccgtgagctctgactggctgtccgccttgcctcctgctggacccagagccccttctggtgcctggcacacagtaggtgcacactgaatgactctgcccagcggaggtgcatgccagcaacgcagtgatgccagaaaccaccacacctgtgtcctcttcccacctggccgggcagaggcgcctttccgggaggccctggaagcttccatggggcctcccacccctgcattcctctccagctccggcaggatgaggccacaccgagacacattccatagattttctgtgtcttgagcggcctggttcagacctggggagggtggaattacagcctcagggtgaggggcaggcgggggctggtggaggtgtgggagctacaggatgtgcccggagcgctcagccgcgggctgtggggaggatgaaaggcacgcggggctctgcgccgcacgtgcctgaaatgttctgggaactaatgggtgctgacattggaagaacctgtggcaggtgggggagcctcgggattaaaaaccaacctgccaggcagagagcgcccacggcacgagcgcgcgcgcacgcgcgcacacacacacacacacacacacacacacacacacacacacacactcgacagaaccctctgatactctgagaagcccaaggcacaaagcccccctggggtgggcggaaccacggcgggaacacaggccgtgcctccactgtcccagcctggccctgcgaagacaggcaggccccaggagccctgcagctcagccacatacggcctccctcaccgctcagtaggtatttgttccactcactgtggaataagcacctattgtgtgacagccaccgagaggcacggcacctggcacacacgaggcgtattagcgccctcggctgccccaccacagactgcatggcttcaagcaacagaaatggattgtctcactgttctggaggcctcgagtccatatccagctgtcatcagggccccacggcctctgggggctctgggggaggcccttcctacttcctcactcctccagctctggtggccccggcaacccccggtgttccctggcttgtagatgcatcgtgccatcctctgcctctatctccacgcagcctttccactgcatctcctgtctctgtgtctccccttcttctaagggcacccgtcatattggatttggggccctcccctatccggttgtgacctcatcttaactaatgtgatctgcaaaaaccctttccaaacaaggccgcactcccaggttccacgcagacgtaccttaagggagaacactacctacttcaggaggtgctccagaaatacttgttttgttcactgctgtatccccagagcccagcacacagtaggcatctaataaatatttactaaacaaaaccactgcagccagtctggcccgaggagaagccggcccggggggaactctgggacagcagttctgggatgtgcgcacaagacgctgcggagcgccagctccacgggtcgagctgttgacaccttgggtgtttactttctggcgtgcagtaaaaactggggaactggccaagtatctgatggccaccttcagcaggactcctggcgcagaacggatgctcaggaatccagctctggagtgagtcctgagatgcggaaagccggtgggacgtggcaagggtgcacctcgcccagcccagtccagaggggcccccacagccaatgaggaagggggtgaagagagagctcctgctgcccggcctggtggctcactctgtctaccacgatttgttaagcacctactgtgtgaaaggtgctggggatacagcagtgaattactgatcccaaatcccccacctcgtgaagctgccattccagcaggtgagacgggagtaagaggatggcagaaggtgttagcacgatggagaaaaacagaaccaggaggcggcaggcagggaatgggggtacattttgaaagtgggcagtcaggggtgcgtcaccagaggtgccttttatgcaaaggcgccggggagaggagggagtctacacagcaggcacagcaggtgcaaaggcccagaggcaggaccgagcctggtgtgtgaggacagcagggaggcctggatggggagagtggggtgagcgaaggcatgtgaggtcactctttctggctatagccagaaagctggggtgttcactgcaagggagctaggaaggacacagctggtgcactttaaacaaggctgacgtgcggtctcctgtggcaagtctgcctctggcgtctctgtgttcaaaggacactgtagctgcccctgtgtcgaggagcactgggcacaggtgtctgagtgtggggcacaggtaaaagggcccctgtaaccctgaatgatgacagccacgattgtcagggccctagagaaacgggcctccacccatgcacagcggcaggcctgcaggaatgaggccagactccttggccctcacttggcagaaaggtcattccactccctaaggaagagccaggtacccaaccccagcctgtcgttggctctgccggaggggctgagggtcaaatactaagagctcaatcccgggtgccacccacaagggtgcggtctgccctccagctgagaccaggcaagccaaacccatcccaaactccggttgctgacccattctcatcaattagagaattatttcagcatctgttatgtgcaaacactgtacaagcacagctacagcagtgaccaagtcagacaaaaggcaaaaggccctgctgaccacggcccacacccagtgacaggtctggcccaactggcagactccccacccaggtgctcagcagggggtggctggatggagggagaagatggaagagggatagagatgggaggatggaggagaaaggaggaagggagggaggaaaggaggatggatggatgaatgcatgcatggatagagaaaggaggaaggatgcatggactgatggatggatggatggatgatggattgatggatggatggatggatggacagaggatggacagatgaatggatggatggatggacgaatggatggatggatagatggaagacggacggatggacggatggatggatggacggacggacggatggatggatggatggatgggcgaatggatggatggatggatggatggacgggtgaatggatggatggatggatggatggatggatggatggatggacagacgaatggatggatggatggacggatggatgcatggatgcatggatggatggatggatggatgggcggatggatgcacacactcatcaccagatgggtatcaacttagctgcttcattttccgggtttttctggtcttacatttctaaccaatccccagggccaagcatgtcttcatcctgctaatattcccaggccctcccacatgcccagctccatgagggacacagaaaggcactgtcgccttcaggaacccccaaacccatataactgctccccaagtcccagcctgctgagtaagaaggaccctagggaaaactgcctccagtcccaaacccagactcagcgtgggagggtctcaactctcccgagtcccccacctggcaccacttctcccttttcagcataaaccagcacatcttccccttgagctgggttcgaggagaaaggccgagaggactccagcctgggaatcctcctccttgaccccgggtagatgtacagggtagagatacgtgggccaggttaaagccagaaagctggggtgcccggagcgtctcgtcaggtcccagacttgctccctctgggcagtttcctgggacttgcttcctcaccccagggtcagctcagctaagccccagagaccagctcttataaagagggatttcacaggaaatttggaatgtctggcttctcctaatgagggctgctcacacattgcgggtgggaatgtcagatgtgcagtgcagccactgtggaaaacagtcactaggttaaacccagaattaccccatgacccagcgatgccactcctagctacacatccccaaggaacggaaaactggtgacaaaacaaacagaaaggattagaatgcccacagcagcactatttacatcagccaacaagcagaaacaacccaaatgtccatctactgacaaacagatgaaacaaacgcagtctgtccatcaatggactacgattcagccacgcaaaggtaagcgctgactcagccacaacgcaggtgagccctgaagacatggcacaaaaggcaaagaagccgctcagaaaggccacgcactgcatgattccattaacttcacaggaggggcagattcccaggacagaacaaaggcccgaggctgccaggggttgtggggagggaggagaggggagtgacggtttaatgggtttggggtttccttctgggaggatgaaactgttttggaattagacagaggtggtggttgcacaacccgtgaatgtcctaaatgcaaactaattgttcactttagtatagccaaaatggtatattttgtacgtattttaccacaaaatcgtttgacaggggaaactgaggttccagccatggccggctggaagtgggcagaggctatctacaccagataggctcggctttccctatttgccacgtcccctcctactcagctacctttgtttacatgccctgcctggctggttggactcaatggggcaggttcagtctgtcttctcctgagccttcagctcctgcctctactggcacctccttggaaccttcccccaaccccaagggggccccccggtgccatggcccgctccccctgccactcccatggactcggccccctgtgccacagccacctgtttaccgctgtctcccccaccaggcagggctcctcctcggcagttttagccgcacctgtaggagcaggagctatggaggctgtgggctgcacctgtaggagcaggagctatggaggctgtgggctgagcccctcggtcactgaaacgagccagtgccctctcaaccaagccacctcctgtggacacactgccattccaaagggctcccacgtgctgatcaattccaaatcccaactccgccacttccacagctgtgtgaccttgggtgaggtcctgacctctctgagcttcacttggaaagattcactggaaaaaagagctacaagaatctcggtgcagttctcggcccacagaagagcccccagaaggagagcgtggctgttactgccctctgccacgccgaccactcgggggaaggagggaggtgatggcgatgatgttaaccaagccagtcactatggctatcttcgccttgcagataggcaaactgagtctgggaggagcctgtgattctcaagtgagcccaaatgccccagcccattattcctgtctccccagtgccacgtcctgctcctgcttccaggggaaaataggccaggtgcaaaacccacccccagcaccagccccatctctcccctcctctagagaggctcctcggccactgggaaagcctctatcattccccacattctgcttcaagccccccagcttccccattcctgcaccccttcaccccaggcaaagcaggccccacctccactccaggccacatttatctcatgctaacaccagaggcagcagacgctccagttccattcaccaaacacaattcgccccactgaacagatcagaaaactgaggctcggaaaggtgaactgacttgcccaaggccacacagtcaggatacgggtgcccaaacccccggccctccccacggccctgccagcccaggcgcccgccctcagtgaacagaaagggaagtggcgttggtcggagcctccgaggaggcccgttactgtttccaatataattggagcgttcctgtccgctggacggcagccagctcggccctgctcccccgccacggcgaagtatgctcaaaatcacttcctcctcccctccttttttttttgtttccatttaattttaaaaggaagagagggagataaaccacagcaggacgaaccctccctgcactccaggttcctgtggctccacccgagaagccctgcacggggagcggccctccccacttgcgtacttcacaaacattacgcctggttctgccgcctcttcctcattaagttccgggcgccccaggagggacgtgttttccattagacccatctcctccatctggccttcccaacagcaatcttctctgcagagggaagtgaggagtcagagaggaggctggtgtctgggcagtggggagggagacgctggcaccagctgtgtaacctgggcaaaccacttaaccccgtgcccctgggctgtgacggcaggagagagggaggccatgccagagtggggctcagggagctgggtggctgagctggggctgagctcctggacagcacctggagaggcggtgggacctggggtttctaaaggatgcggacggggttggggtcctgggtcttcatccgttttgcttcatggctaagaatgaaccaacaaccccagactacatggaacacagctcctgacattatgctgagtgacagaagccagccacaaaaggacaaacactgtgcgattccactcgtaggaggtggccagagtcactgaattcatagagacaaaaaggaaaatggctgggaccaggggctggggagagcgaggaagggggagttactgtttaacagatatagcgattcagttttgccacatgaaaagtgctggagatcggttgctaaacaatatggctattcttaacactactgaattatctacttaccaatggctgaaggtaaatttcacattatatgtatctaccacaatttaaaattaaacaacacctcctccagggagacctccctgattgctagtgttgtgcttgtgttgttccgcggtggccccaaaggctcaggctgcccccataaaaggcaaagtgttgccagtggccccggcactcagcaggccctcagagccgagtgcagcatgcgtccaggccttgtctctggcccacctcacctcaggaccccatgacggccacagggcatggctgggcagcgacttgcacctctgatccctcggaagcgcccgataagctgagctctcccctcgccagctgcctccaacccaggtggcctcaaggccagggcccagggaagggctgactgcttcagaggggcccctggaccccaaaacttgaggccagggccagagcccttctctctgcccaccagtctgcagtctctgtcccacccgctcatgtccatgcccagaccccgagtgtgaaggcggcctccgcaaggttcccaccgacttccctgcctccaacatctggcaaacacatccacagctgtgcagctgccggaaacgcctcctcccgcttctcctccatgcacgcaggccctcaaggatggctttctgaggaatttatggggtcgcctctagtatttcagggtagatccctggaggcatccaccacatgtgaatgaggacaaatgtttctgctgctaagaatagctgtgccagcagcagcgtccagggcgacagagcccacccactcaacaagggtcccctcctgcctccccaacccatcccagcccccagcaagtggccaggctggaccacaaagggcctggatgggaggaccccactgccgcctgggctcccaggctaaacgggaagaatccactttacgtcagctctgtccaatgctcagaagtggacgcatctgggccattcaattaccccaggggcattgatcaataaatgtctgatgacgggacagtgatcaagaacccaaaaggtcctatggcccctgcagccaggagctcagacagtaaacaaatgcttcagcgcccaggagtggcgacggctgaagctaagcgtctacctgggatcggatgatccacccgaagaagggcagggacaaaaagcaagaggagagctgtagatacccaagaccctgccggaacacaagggcccaggcaggcaccacgccgaggggaggggcccgcaggaagggggtgaccgcagctcagccccagccaacactgagcagagacccaggaatgtggcccccaaacattcctgatgttccagaccctgctggaacagggtccacgtggggcagggggtccacggcatccaaatctttccagcaaagccaagaagcccaattttgagacatctcccgatatttctaaaaaaacactgactataaaaccaacccaataaatcagtctgacagccaaatacagcccaggggctgccaggacatgacctgtggcttatgacgtggtcactggacgccacaagagaggtgagggaaggctggggagctgaagcgggctgatggggggacaggaggtggagcgccagcaacggcttggaggggggacccaagaggccctcaactattaaatataacaggaatgaaacttacccagtgactcatcggcgccacctgctccaccccaatgggacacacacacactggccatgaaaggcaggccaggcagggaccccaacctggccccatctccaacacagggagcaagacacagtgtctctgcccacccggccccactccgtgcatgccacaccccaatttccctgggcaaccaccccccctgcaccctcagtcctggggtctcagggaggctgacccagccctccagccaaagtggcactggctttggtggggggggggggggcttaactctgaactctcaagctgaggcaacaaaactcattcccatgatatttgctggaatattgggaacaagaagctgtccttccactggggctactgaactgcaattattagtctcaggctaacagggactgaaagtggggagcacctggacccaactgtgcctgaagcttctctgaggttttttagttacttgaactatttgtgctaaatgcaggaggcagagggagtctgtccattgcaaccaagagacctaagatagcaaccctcctaaaacacaaactctcagataggatctccctggaatcagatctcttccacccgctaggtcccttatccatgtaggtgaggacaggtccaaagccagccaagaagaggccagagaaatggaatgggagacccaggccagactcagtgtagggggaaggggccaggcaggagccagggagaggcctgtcctgtgtcaccctgaagggaaagtgggtggctcccagtcccttcctgagctgtcagtggctctcatgggtgaaagagcaggcggcagctttgcagatgaacactgcccagcacagcccagctctgatctgggtcacttctcagaggcagacacaccccccgacggccgccccccacagtaacctgagcctccggacctcggtttccggaggaacatcacgatctctcttggagggaatgtctgctagccgcaccgcagaaccaaatgtgctgataaacctaggccaggttgagcaagcctgggctgctcccgccaggccagaaaaaagaggcattgtctgcagccaggagccaccacatgggctgtacccatgggcatgtcttggggccatccctgccaggccttcagtttcctgggttgtaaaacaagtggctgttccaggcctcgggggcagccaaggcctcaatctggagcaggtggcgaccccaagcccccaccccacaggcactgatgcaccccagctccgcttctcctcccgacctccatggggccatgtgcttgttacagctcccgtttcctaggtggaagactgaggctatttgcacagggaggagcagggcagcgggaagatgagcaaatgccacttccatcttccacgccgctgccctgagcagccacgggagggaacacctcgcagccactggcacagccagtccccaacacaacacttggtggcaccaactccttcctcacagcgcccccgtgagggattctgttatcatccccattctacagctggagagactggcacagagaggccgagcaacttgcccaaggtcacacagccaacaagggcacagcctggatgcaaacccaggcgagccacctcctgtgtccagctcacccactgtgtcctgggaccctgtcaccagcatacccatgcctgctgcttaggttagaggagactgttgtctctcccaccaggctggagccaggccttgcagccctcccatcccatgtccctgctcacaagaccaggccaggtcctgccagccagaggtgcccatgggccgccgcggacaggctgtgggcatctccatgtccacttgagagcctgctgcacactgtccaccccgggcccaggaggagacgaaaggccacatcctcacctccctcacggcccagctccgtgacctccctcatcagaacccggaatctggactccaacctgtgctgctgcatttcctctccccccacagccccaaacacaagatccatgaagcaagagtcacacctttgtgtcccccagagtcccagcacactgcacatggcaggtgctcaataaatgtttgctgaatgcatgaacatgctaagagcaaaatcgcagacgtggagctgaagctcaaagaccagtttgcaaacagagagactgaggctgagagcacagacagggtgtgcttaaagcccagatttcggggtaccacctacaccaggccaggtccatcaaaggcagccgagtgtcccaaatatcaggtaactgaccccaggtccacacagccggccggctccactccaggtctccaagtggccgagaactctgatccccactcctggaagccccagtgccagcccccgtggcgagactgtaaggccgtcagtgccactaaggagctgtgtggcctctgccaagtagcctgccctctctgggcctagtttctccatttgtcaagggcacccggcaaacctggggcttgctgggggatgagtgcaacccgggttctgcaggagtcaccagacgcgtggggaaagggcgtccggggcctggggcaaagccggggtagaatccgagagcctcctgcctctgggtcctgtccccttagcagggctgtctgaggggacagcgaacagcaggcggcaggtggggtctagggccttgtggatttggttctcggcaagaaaggcaggttcaagcaaggcgtccttcctggaaagtccagactccccgaatggggcttcatgcactcccaggcacaaaggggttctcggccacccaaacttgtcctgcaccctcaggcttggagtggggaacagtaccaacccccgccagggccagttcccccacctccagagactggcgtcgccagctgtgttcatttcctagggctgccataaaaatgaccacaaaccaggaaacttaaaacaacagtgatttatttttatttttttattattttttgacagggtctcactctgtggtccagggtggagtgcagtggcacaatcatggcttactgcagccttgacctcctgggctcaattgatcctcctgcctcagcgtgggactacaggcaagccgccaccacatccggctaatttttgtgctttttgtagagacagggtctcgccatgttgcccaggctgatcttgaaatcctgggctcaagtgatgcgcccacctcggcctcccaaagtgctgggactataggcatgagccacctcgcccggccaacgacagcaatttattctctaacagttctggagcctggaagtccaaaatcaaggcgtcagcaggaccctactccctccagaagctcaaagggaggctcctttctgcctcttccagatgctggtggctccaggcattccttggcttgcggcttcagccctccaatctctgcctttgtcttcctgtagttcatgtagtcttgctctctcctcttctgtctcttctaaggacactggtctttggattcagggcccacctgggtaacccaggatgagctcatctcaaaacacatctgcaaagacccttttatcaaatacggtctctctctgacaggggctgggttactaggacatggacctaactcttgggggtatcaccactcaccccactccaccagcccccgccttttctgacattgcccatttcctgaaagctcactccctgcctagctctgagcccaagccccagcggaaccccatgaagcagagggggaaacggaggcacagggagttcagccgatgcccaggggaccaagtggggccaaggtttgaacctggctttccgagtggccccaacacagtagccgctgggtattggcctccctccagtttacaggaaacaagggactctcacgcccacgcctctcggccgagggccaaactgacagtgagtcacccccactccacaggccaagaagcttgaagcagctcatcgagggggaccagacaaacggtggggccagggagggcttcctggaggctcagcttgctccagtgtcaacaggggagcaaatcccacctcccgctgctctctcgggaggactcagcgagaccctggaaggaggcagcttggcacacaggcccctggcaatcaccacctccctggttattagcaggcctggcccagcccacacagctgcccacccagcctctgaccccagccacagaaagggcccattatgacatcacaggccaggaattatgttattagcctgggaaggaggctggcctcaggaacaaagggctcattgtcatgcaaatgaacgactccggaggaagagggcagttcctccactctggggtgcccctcctgccctctaacttctaagccacactggaaactgacccccaaccttcagaagtgtgggcatctctgggcctctgctctgggctaaatgaggcgcactctctcagcctgggaaacgggcccctgccagttctgagccagatccccagaaaacaggacccgcctcggaagatagggatagtagagggacttttggggatgaaacaggatgatccccttaacatgctaagcatgaccttgagcaaagaagcaactgccttggaaatgccattcagttggtaatactgcaggcctgcagctgtgtgtctttgagcaagctgcctaccctctctgtgccttatcaggagagggtgactctgtgccgactttacaaggctatgggaaggacacaatgaactaaggtatgtggaatgctcacctcgccttggtcctcaacacacaaggctgaggctgtcaccacccctcccccactccccgtacctacagcatccctgggttccttctcatgactgtatctaggaggggtagctctcttgggatgcttggtgggtaccccagtggcagtcagagaaaaagcatgagaacttttcctggttttccaaatcatccccaaaatgcagggcctccttcaccagagaggccccatttatggggaggggacaggctgaggccccgtggaagacactgagtcaggcacaactgtctcctaagtgcctgctacatacccagtgctggggacacagcggtgacaaagatgaacaaaatcctggatggaggggtgctggagtgtgaatgtttatgtccccccaaaatctgcatgttgagacctaatcaccacgggatgatgtcagagcgtggggcttctgggaggtgatgagctgtcatgagtgggattggtgcccccagaaagccgccctgcccctcttcctgggagaagccaccatctatgaaccaggaaacgggccctcgtcccatgtgacaccaaatctgccagcatcttggtcttggacatccagcctccagaactgtgagcaataaagttctattgtttgtgagccacccagtccaaatagactaaaacaaggtggggacaggggtgatgggcataccgcagaccctggtggtgacagtgttacaaggagtagtgaaggtgtcacagggagtcacaactgacatcaggcctctctcaggaggcgccattagcagaggcctatatcagggaggctgaaggtctcaggaaagggtgttcccagaagaggttacagccaggccgggtgtggtggctcatgcctgtaatcctagcactttgagaggccgaggcaggtggatcacttgaggtcaggagttcaagaccagcctggctaacatggcaaaaccctgtctccactcaaaatacaaaaattaggcatggtggtatgcgcctgtagtcccagctactcaggaggcaggagaatcgcttgaacctgaaagaaaggtggccacagctctgcactccagcctgggggagtgagactttgtctcaaaaaaaaaaaaaaaaaaaaaggttatagccagtgcaaaggtcctgaggcaggcccatgatcaggggccccaaagaacagcaaagaagaggctcatgaggctggatgcccccaaaccctatcccacccccatctctccagaccctaagctacgacccatgcccacgggacacaagcctccaccacgccactctgatgacaggaacacccttacagcagctcagtcatgaggcccccacaggccctgcaggcaccacgtgtcccccagcctgggatgctctggagccctctgtgatcctgaggcacaaagcaaactctgcctggaccccctgggatgtccaagggaccaagctcagttacaggccagcttcatgggggagtcctctactaaaaatacaaacattagctgggcttgatggcatgcgcctgtagtcccagcaacttgggaggctgtgacaggagaatcgcttgaactcaggaggcagtggttgcagtgagctgagatcgtgccactgcactgcactccagcctgggtgacggagtgagactcggtttcaaaaaaggaaaaaaaaaaaaaaatcaagatcccaggatcctgtgtgcccttcacccagcctcccccaagaataacatcctgagacaaacctgagacaacgacaattcatcatccatatcataactaggaaggcagcatggatatagccagccgtatgcagattgcagcagtttccaatgcactcacttgtgtgagtgtgtgtgtgcatgtgcgcatgtatctgtgtgggtgtctgcatgtgagtatgggtgtgtgtgcacgactgtgagtgtgcatatgagtgtgagtgtgcatgtgagtgtgagtgtgcgagtatgcgtgtgcatgttcgtgtgactgtgtgtatggtgtgtatgttcacaagtgtgcgtgtgagtatacatgtgggtgtgtgcgtgagtgtgcatgtatgtgtgtgcatgtgtgagtgtgcgcgtatttagttctatgtgttcttatcacatgtgcagactccagtgatcacaaccagtccatgctgagctgcctcgtcacaaaggccctggtgctgacttctgttctgaacctcacccaggactcttctccaccgggtaggaaaatcgagtccctgaggactttggcaaaggtcaggggcagccacgacacagctctgtggccaacccaagtggacaccaaggccctgggggtgacaaggggacatggatgagaacccccccgccttcggaggccattctcgaggtcccaggagaggccccatgacaatgagacagcgggcagctggtgcggggggcctggacgcccggggaactccccactggctcctgctggcccaagagcggaggccctgagccagtcactggcccagcatccggtgtcacttacaaacacaggacggctgccaccttctgcaggagaactggccctcccgcgccagtccccaggccacaccaggcactgtggggggtgcctggcccagggctggcacggaggggctcaggctgagtgggagacggggcagaacaggcaggcatggggggagacctggggatcccaaacaaaggcagagcctgggaagcacccactcgacctacctcccattatctggacccaggtttctacaaaacatgagagctctctgcaaagaagaaaagaaaaatggacggaactcgaacttaaatccaaccttgtggttacaattacggaggcccacccaggccagcactgtgcgggccccttcaggcttctctcaggctctcccgagacacaccggcaggctgcagtgctaccactgtggtaaaggacaaggaaactgaggctctgtgggattccgggacttgcccaaggtcacaccatccttgaggggtcgagccaggactggaacctcagtccggccactacaacttcataaataccatcgccctgagatgctgaaatcccaggggccccccaccctcagaccaggtgccggtattgtcagcatcgagaaaacaaagtgccagtgaattatcaactgtgagcctattatgagctagaaggcaggtttcattcactcccttaagccatacagcctatgaggtggggaaagatgcaacttccatttgccagatgggaaaactgaggctcagagacagtaagtgacttgcccaaggtcacacagccaggaagtgtccaaccaggacaggaacccaggcagtctgccccgcgttccccctaaaactgcagctccttctcccgtcagtcccatgcttgtgtagaccccactgtgccccattttacagacgaggaaactgaggtctgcaaaggggaggcaacacgcccaaggtcacacagcatagagaggacggagccaggactcaaacccaggtctgtggcaaaggagcaacattgcctggaagcccagccccctcccttccccagcctgggctcagaggtccccaggagccattcccgccacctccctatggccgcggcgcacccagacctcaggacaaatcactccctcatccccccggtttgcaactaaaggctccttgtgagctcgggaagcccttccaactttccagtgtttatcccggctcctcgctgccaagtccctgggcaagcctgggccggtggcgctgatttcaaaccagacatgggcaccgagccaagcgccacctcggtggggagccgggcgccggggccgggctgcagcgctgcctgcacctggctctcccctgcctgagcccaccgcggagccccagggcagagcctcgggagcgcccacgatcacatgccctcctgaagtcaactccgggaacagaagccccctgagcccccaaggctcgccatgctcccccccagggacgccggatgtgcaccaaggagaggagcacagtgcccacccgggtcccctcccacgcgggccggccaagaagcctcaccccggcctgcccggccagcgcctccgagcgctcttttccgtgactgcagcaacttcgtccgatgagacagccctgcccaccatcccgctgagctcagggccgacaacactgcgctgccaggggagggtccagctgcccccattggctgacctgcggccggccactcagcccccagccctggccaccacctccagcgacagaactggggctctttccagatgaattcctcggcccccaatcagcgcccctgcatagagcctgcaggccacagccccccaccccagtctgcgcccacctcccccggccggggtgacccagccacactgcacctccctgcccactccaagcccggcgacttctcttacccgagcacatgaccaacctcgctcacgtcagctccaaacacaacttgaagtaactctctcacaagaaaaaaaaagaaaaagaaaaaaagtgccagccagcgggccagcagagtccacacacacaggctgtgctgccggcttccaggaggcacaccacagccaacatcagacccatccttcctccaggatgacacccgcagaggggcggccccagagggcggcctcaccttcccgcgagactacgactcccatcccggccctggaggccctgcagggccaggccaggccccccaggctcccagcccgatgccccccaaacccgggcaggccaaggcccaccggcgacaagtgcggggccgcctgaccccacggctgggccgtgaacgagacgtcgggcctccagcgatccgttctcgcctctgccactctgggcctataaacacagggaattacataagtccactcctcttgtttggaagccaaaagtacgagctttttctcccagccttggcagtaagtaataattcctcatcgccatggtaaccctggcgggcttccagccgacactcgggagctgaaacactgtgaggcctttttatagctcggctcttcgctcgctggcaggcgaaagagagctccagccccgcttctcccactttaacccgcttcctcccagcccggactgtccagcttcgagccgcacctgcacctccaacctgagcgtagctctggcgccttggctccggcctggttccgaacccaggcctcggcccatccctcccccgtcctctgtcccgagggccagatggccagaggagcaggctctcccttgcaaatatttctgtcctccttttaatcctaggaaaagaaagcgtgaccccctcacactggcattctgatctggggtcatctcggtgacaggcctagaaaagaagacgtggccaaataatacacacacacacacacacacacacacacacacacacacacacaggccaacaatgatggcttggtagtcagccaggagtctgaaccttggctgcaattagctgtgtgactcagagacaagtctgagcttctctgggtgtcaactttccatccgtagaaggggcaggctgagctctgcttctccaagtgctctggaaagcagagatgaggcgccagaggaagctgctggagctcccaggaggcagaggaggctccaccagggtctccagattcacttccctgcccctagcagccaagagttgggcctaagaatgtgtccctggacagcagcccacatgatgacaagggtctgggggtgcagatgtgaggaaggcacccctggcagaagcatggcagatgtgaaggtctggaggctggaccacgcgggtgtgttgtcaaagcagagagaaggctggtgtggccggggcgcaggggcgaggcggggagagtttgacgatgaggtcagggagctaataggagtggaggggaagtggtcagatggactctgggcctggccttcaactccagcaataacattgtcatcctttttactctcaggagcatcttgagagtaataatattaataacaataacagtggccacacacaccgagcccagcagctcggactgtgtgcccagcactgtgctaagcgggtcccctggttcaccagctggcctcacaccaccgcggcataggcaggtatgcccctgagccgccacacacagacagagcaggaggctggcccagagagggtaggtgacttgcccaaggtcaacagctagtggctgagctgggacttgaactgggcaagcctggcttgtctccgctatccacgtggtaattcagccacaaggagtcacaggagggtttcaggactaagaccagatttgcctgtgacaggggcccgtggccactggactggcagggggcccagactggccacgaggggatgagcatagtggctgcggaggcccctggaagccagatgtctcctgtgaacagctggccctctagccttccccaggaaacacccctggggggtttccgtagacctgccccaaagccaaaggtgggattctgctactcttacgccttcttttataggtagggaaactgaggcacaggaaggcacgggcatatttttagcccaaagatccagcaccatcttcccgcccagaccgtcgccaagaccaggcgggaccatgacacccaggccaaactggccccatgcaaacaccaccaggaagcggtgcctgagagcggccgagtcaggcctcaccacctccttctgttcatttttgtttgttttggacacagacctgcatccagaccttcgccaaaggctggccctggaatccacggtaactcctcccaccccctcagagcgactgtgtgctatgggcaggtttgacactgggcatgtctcttcacggccactcgttctgcttcctgtgtcttccccgccagacactccgcagcaaattgtttgttgagtgacttaatgaagaccacaaatcatcaaacaccagaaacagccacaggcagcagcccccagacagagcctgtggccaaaaccaaactcatattcagaataagccagtgtctggttatctgctcagcaaaagaactccccatcacgcaagccttcgacggcgaccacccctccatacttcgaaaaagcatcccctggccaaaatctgccgacaggccgcttcctggagcccgtctgctgagcagagctttgacggtgggaaagatcggtgaagaccccccagaatatgattcaccgcaggccacaggggccaggacagtgggccaaagggggtctggaaaggggcagggggaccttaagctgagtggccccaggcaaggcccccagcctctcgaggcatcagaaggctcagctggcgaatgggggagctcctgcctgctgcctctctcgcaacccaggtcaacagaaactacatgtgtggggcccaggggggaggtgggggccagaactctgaggaccagatccagacccacagccgcagctacgcttcagcatccggctccagctggaagagacccccactcacttcctccccacacactgctgcttcctggccaggcacagatacgagtggagcagggtgggggcaggagaaagagacagcaccgtgagccagacacgtctggctatctgcacctcctcaatcccgggccccagggctccgtgacctgggcagcctcagtttcctcatctgaaaagccacttagatatcaaatggttctattgatgtatgccacacaatggaattccgccatataaaggaatgaaggactcacaccattcaacacggatcaacctcaaacacattgtgcggagtgaaagaagccaaaacccacagtgcatgattccgtccaggagaaatacccaaaataggtaagtccacagaggcagaaggcagattggtagctgccaggggctgcgggaggcggcaacgtgaagtgaccccaccggtacagggttccttttggggtgatgaggacattttttggatagaaggggtgggtgctcaacattgtgattgtactaagaactcatgaactgttcatgttaaaatggtaaattatatgtgatgtgaatttcacctcaactgaaaataaataggccgggcgcagtggatcgcttgaggccaggagctcaagaccagcctggctatcatggcaaaaccccatctctactaaaaatacaaaattcagtcaggtgtggtggcgcatacccgtaattccagctactcaggaggctgaggtaagagaattgcttgaaccaggaggcagaggctgcagtgagccaagatcatgccactgcactccagcctgggcaacagagcaaggccgcatctcaaataaacaaataaataaacaaaaagatggtgttgctgaatgcacaccactccagcccagtttaccgacttcctgaaagctgggtccaactcccagcaggtaggagttcctcacccaggcctggagctatcagacattcgagaagcatctgctgagcccctactgtatgtgctgagcactggaaatatggcagtgaacaagacaaaattacattttacattttaattttaaaatacatgagtgattaaaataaagttcacaactgtattcgtttcctgtggctgctataacaaattattacaaattgggtggctgaaaccagcgacctatcctctcacagttctggaggccagaaatccaagctcaaggtgtcaccagggccacacaccctccaaagactctgcagggggagccttctctgtgtcttccagttcccagtggctcctggcgttccttccgtcttcacgtggacttctctgctgtgtgtcttctcttagaacacttgtcattggatttagggcccatcctattccaggatgatcccatcttgagacccttaccttagtgacatctgcgaagacctgtggtccaaataaggccaaggtcatattcacagtttccaagtgtacctatgtttcatgggccatgactcaacccactaccaaagccaagacctcaaagtggcagcagtcgcatgcccggaaacacctttggtgcccctttcctttcccgctagttccagaaaactggctggaagctgcagaggagagctccagggatctccgggatggccccagggcccccctatagccgacagagctggaaacagacctgagagatcccacagccaccctctccggcctgagcctgctaaaaactggccccaaggaacccaaatccccttccctgtggcaggcatccatgagccagccactcgtgggcagcttgaggaaaggggcctgcctcctggatggggaggccagacacaggccatcacctctgcccctaaataaagacactccccagaccaaaatgcatcctatttccccatccaggcccgggattcttctccacaaaagcatcaaaatgaagccctgaccacgttggctaagggaagccaacggtactccagggctgtttttctgcatgttgtttttatttttaaaaggggccgcccccacccacagcagctgtgagctggcagctggcagagttaattgctcactcaagactcacttccaactgcagcaccatccggcacgccagaataccatgggcacccagcaactggcaaggacggctgggggcagggggcaggtggctgcctgttctggggctcctgggaacccacaccccggtggcaggggcagcggcagaggaaagaggagtgcccaggaatgctccacgccagccagctggatcccagggacctaacccgggaaggacacatcacgccggccagcatcacccaagctctcagtgtgccagggtcagtgggcttcacgcggcctccactgtgccttacaaccggcgtgtccagtcttttggcttcactgggccacactaaaagaactgtctcggatcacacataacactaacactaaccatagctgatgaactaaaaaaaaaaaaaacaaaaaaccgaaaaacaatctgttttaagaaagtttacaaatttgtgttgggctgcatttaaaaccgtcctgagccgcaggttggacaagcttgccttacaacaatcctatggggtgctgtcatacccattccattaatacatactgggaaactgaggcagagagcagtgaagtgacttgcccaaggggacggggctgggaagtggcaatgtcggttttgaactcagcaagtgtgaaacccgcatctacgacactaaccactagactatactgtctccaagaatgtcaggccccactggagacatggtattgttctctgagaaactgctgtggccgtgggccttgactttcagaaatggcatctccaatggtgtcagacgtgacttcccaagacttgagaccttctggaacagcccatgggacattctacccagatcacagtggggacaaaatactttaaaagtcactgctaagaagaggctataaaatggtgacagccagttgtggccatgaagaaaacttgttctggcccattcaatgttttttaaaaactaggccattccttataaaatccagatttccagcttctcttggaaaaccatcagaatacccagcatgccagttagccacaatccccactcctcccctttgacctgcactgactcactcactcctttcctccctgtgtctgagtttgggacatccccttatcccttctttggccacctcctcttgctgttgcaaacagtgaaacaaatgtcgaggacctcactcaaacaagagaaaggagtgtccctcctgggatgccaggtgactctccttctccttggctggctgggctgggctggtggcatgagcctgtctgagaacaaggcccgcatggaaggaggcacagctgaggcaaagccagctcccagaggcattgtttgagcacctagatccagccgtgcctgaacgtgtcctaccctggccactctgaggacccatcaactccccgtcatagcctaactcggctcgagtgtgtctctgccacaactcaggagccctaactaactgcccctaactaatcacccccaggtctccccttgaatgactcgtccctggacgcctggcctgatggaagactaattcagctcttgcctcacccaggtgaatgcctgaacctcgtcctcacaaccctcaccacccgcgatagcacttgcttgtttaactgacactccccctctggatactaaactcgaaggcacaggcaatgtccaacttctccaccattctcatcccagtgacgtacatgagtccggaacatgccacgtgcccaatacatgtaaattaaaaccatgtaaatacatggaaattaactatggagcaaaagaacaaaagggaaaggcaaaagtcattaaatttgacttctgccttaaatgtgaaaaacagcccagccctggaggtctgcaggacagtctcagatccaggaaagccctcctggggcccccctgctctgctccagccattacagagtgggaaactgaggcacagaaccccaatcagcatgcctgaaacatggtggccggagggccttcgcgcctgctgttccctcatcccccttcctttcacatagtgggtgcctccttattgtccagggcccagctcagatgccacctcctcagaagctaccctggaattcttacctaaaatgagtcccccgaaactgaagtcatccctacctccccaccctgtattatttcacaggcagcattttcttgccttgcaaaatcgtgtttgttttttggcactgcccatctccccatcagcctgtgtgatccataaggcaaagcgccgcatcttgtttgctgtttgccatcccctcaaccaggaggaggccgtggggacaccaatctggctgcagggaggcaggaagcagatgtcccacgtcctgaccatcccacactgcccagagcagctgctgcgtgcctgagggccctacgtggcacatggaggctgtcccacagctggcatggccctgccaagagatccaggctggctgcggcagtgatcggcgtacccacggggcagagggagggctgcaggtggcacctgcaccatccacacgatgaaaagcagctgccgtggagtcaggcgttctgggttcacatcctagctctgccaactgggcgaccttggacaagtcccctaacctctctctgccctcaatccccttaactagaaaacagggctgatcataatagcacctactttctaaggctgctgcaaagagtacatgcgtgtatgtatggggtgcacgttagaaattgtagttaatgttaataataataatactggcaactcacacacagcactgaggcaagaaaaggatcaggaaatgttagcttttatggtaaatatggtatttgctctgtgccaggtcctgtttgaagcatgtacacacattagtccctccaagatgggcttatgattattcaatgtgagtgttccagctcctccaggcagcctccttggattgctccaacccccaggaacaccatggacacacacaattcttcatgtgggtctttcctcaactcctctctccaccccaggtgacagtgaggggcagggagagccccaaaccccgcaagcctgaagtcagcaccaggggaatgtgtgaacccccactcccatccaagccacggcccagcaacgcaggccctgtccggctgcacaagtacaccctgtaaagtaaagggtgttccctccctgggcccccagtagaggcccagacatcccaagggttcaggccccactgcctcgtacaggacctggagtctggagatatggagaggcaccatggagggaacaggtgtgggctgtggctgggcaccctggagctgcatggacagcgaacgaggacaagactgcccccagccacccccatcctctgtccatgcccagcacatgctcaggtcctgaggagaaaccacgaggtggggcagctggtctcctctcccccgcggacagacaggacgctaaccaatcagccacagcaagaaccccagcaaagccagcctggggtgcacacagctccctgcgcttctcggagaggacaggcagccccttccacgtcaggcacatgaggtggcccccgctccccaaaccaaacagtaagaagcagctagaatcccagcttcaccacctcccagctgtgtggtctcactcatgctcctccacctccctgagcctcagtttctccaactgtacaatgggtctaaggaccattatctcaggcaggacagagagtcccccaagagccagccaatcagggccgctgaaagagaaagagaagatctggaaagaagctattttaatttcagcaaatgggcttgctttgtccttagtgaaacatgattttattttacagttcagaatggcatctgtttatggcagtcgtggaagggatgatgagatcttttcagcagtgaaacctcaggaggcctcaggccatcctgattcagcaaatccctgaacaggccgtgctgaagggtagatgacaaacacggcgccccgcacagacgcggccacagcacacacagcacgccctgtagggtgagatgggaaggacgcagacgggggcagatgacttgagtgcaaagttcactggctgtgtgacctcgggcaagatgcggaacctctctgtgcctcagtttcctcatatgtaaagaggggatgatgataatccctactttacaagagcttttaggtgatgaaataattttttatttatttttttttttgaggtggagtcttgctctgttgcccaggctggagtgcagtggcacgatctcagctcactgcagtctctgcctcctgggttcaaacaattctcctgcctcagcctctccagtagttgggattacaggcgcccgccaccacgcccggctaattcttctgtttttattagagacggggtttcaccatgttggccaggctggtctcgaactcctgacctcagatgatccgcctgcctcggccttccaaagtgctgggattacattacagacgtgagccactgtgcccagtcaattaaataaattataacatgtgaagtgtgacacaaggacgatcacaaaccctgttaggactgctgctgtcactgccatggggtgctcccacttcgaagctccagtaggtttacaaacccaactgcagcataaagacgggtccacctggatccctgggactttgcactgaggtcatctgcccccgtccgtgtccttcccatctcgccctccagggcgtgctgcgtgtgctgtggccccatctgtgcggggcaccatgtttgtcatctacccttcagcgcagcctgatgagggatttgctgaatcaggatggcccgaggcctcctgaggtttcactgcggaacagacgtcatcccttccacgactgccataaacaggcagactgggtaaataaccctccagggaccccaccaccacctccaccaccaaggctctctggaagcccctacagcagcgcctccccgcctcctccctccagctggggtggggatgactatgagacggaaggagacacatgtcagagccgaagattaaaaacaagtacaatgaccgggcaggcatccatccacaatgatgaatctgatgtaattaggcaccccgctgacttcattacttatttatttacgggattgcttatttaatttacaggcctccttccccgaaaagtcatcttagctgacacccctcaggcaaggaaaaaggagaaggaggccccctcttccatcccagcccattcctgggcttccatatgccatgctcctcccttgccccaaaatagctccccggaaggcaggtgtggttttgcccaagacaacaggattgaacaaggaagacccttggcagaaccaacgcctgacattcactcaacagtgctcagtgccaaaggacagtgcttgatccggaaggcacagcgtctcctccacaccctcatctctccagcagaggaaaccctaggaaaaaggtggtcctggccccaaccagccaccaattcttggcatgaccctctggactggcaaacacatcactgcaacaaacggagctggcacctcctagcctgaaggaggagaaagggcacacaactcagagtcatgagtttcatttcttatcggaatggaagtcacctgacctgtcagagcctcagtttcctcatctgtaagatgagtgttaagaacaacacctctgggcgcggtggctcacgcctgtaatcccaacagtttgggaggccgaggcgggcagatcacctgaggtcgggaattcgagaccagcctggccaacacagagaaaccccgtctctactaaaaatacaaaattagccaggcgtggtggcgcatgcctataatcccagcttctagggaggctgaggcaggagaattgcttgaacccgggaggcggaggttgcagtgagccgagatcgtgccattgcactccagcctgcacgataagagcgaaactccgactcaaaaaaaaaaaaaaaaaaaaaaacactcactaatcctagcactttgggaggccaaagtaagtggatgacctgaggtcaggagttcaagaacagcctggccaacatggcaaaaccccgtctctactaaaaaaaaaaaatacaaaaactagccagatgtggtggcgcatgcctgtaatcccagctacttgggaggttgaggcaggagaatcgcttgaacccgggaggcggaggttgcagtgagccaagatcatgccatggcactccagcctgggcgacagagcaagactctgtctcaaaaaaaataaaaaataaaaaaataaataacaacactcacagctaactaaccccaaacaacccaactggtgcaatccggcactgcactgtggtctcaaccactgcagccggacgagaagcagtcagtcagcagcataaagactagaaaggaaaacacagagctagcgttggcagacacgagattatctcccaccatcctttagactcccaccagctggccagacacataaaatcaaaacacagaaccacagctttgcccaaaaggcagcaaaagctgaaaaatgtaatcgcatgtgcattagggtctcctggaacggctaacattaaaagattgacagtagcaagtgctgacaaggatggggagcaactggaactctcatccactgcaggtgggcatgcaaaatgggacagccactttagaaaacagctggtggtttcttataaactaaaataacacatttaccatgtgacctagcaacccaatgcctagatattcacataagaaaaaagaaaacatgttcacacaaagacttacacaagaatgttcagagcagctttattcccaatagccaaaaactggaaactttgatgtccatcaactgatgaatggataaactgtaatatatccacagaatgaaatactacttagccatgagaaagaatgaattgatacatgagcaacatgggttatgcagagtgaaagaagccagacacaacaaagtatagtatataataaaatgataattttattataaaattctagaagagttaaaagcttctataacagcagatcagtgggtacctctagtcgggggtggggggtggaggtgggtgctagagatttagtgccaagggactggtggggatttggggggaacagaaacactttattctgattgtggaggtgatgcaaatgtttacatttgtcaaaacacatgcaattgaacccttaaaatgggtgcatcattataggttaattacatctcaatgaagatgatcttaagtggaacagggagagagatgcatatattaacactactcactccattcccagtacccagggactatttcctcacttctaaatcagtctgctggttcctaaactggccctcaagtttcccaaagtcccctgatgtatgagcattggacagtttgggtctgggttgaaccccagctttgtcctatgctagctaggtcacgtagggcactgtgccccttagggcaaatcgctttgcctctctgcccctcagtctccccctctacaaaagcaaggtgagaaataccacactcctcagaaaactgccaagtaaaatgaaccaaagtgaacataccagctgcaggccccagcatacagcaggggcttcattattgctgctgccaggtgataaatggtcaagcccaggcccactgtggacagagctggccaggattcttgtaaccctgacaaacacaacacacttcctcaccccaccagacaaggctctgggctcaaatagctgcccccaggccccgaggactcaggccggggcatttaactgatgcctgctgtccggacaggacacggttcctgggctccacccaacccgcctctcccagggaagcagggacaaaaggatggggccctgtggggatggctggccctgaggacaacacaggcacatgagaggtcatttcaggagaaggacgtctgggaggcatccaccaactcatgctgaacaacagtccagccagagcccacccgtttatgaaagaaaatgataataataatagaaggacagggagggggctgcagggatgggggctctgcaccagctcccacaggcctgtccagggctcctgctcccctctgagtgatggcagggcaggcgcctggagccaacggcaggaggggcatcccccgggcccgattagcgggcggccgcaggcagacacgctcaactgtcagcctcctcctctcagcccgccatcacaggcaccattaattgctgtcatttgagggtggcctgtggggagaaggagggaggagaaggaggggtagggagcaggaaggaagggggaggggaggaagggattgcagggagcccccgcccagggctgagcatccaggctgggaaggagagagaggaggatggcagagagggaagggtggtggcgcagacagggaagggcagggggccctgaattgctctcctccccacccaagcagggcccagggccccgtccaactggggttaaagccggtcctcccagagcccccgagaggtgagatcccaccgggccagggccctaaaacctccccctacacaccttcggtgtccccgatcacccgcccagggtaccccgagaccccagcccccacccacaccggacccctcaccccaatgtatagacaatcccagacacccacctccccaccccactcccagctgaagaatccactcacagagtttcgagtcacgggcaacccacttttggggccaggggctcccacagcccccttctaaggtcctaggtccgcagggaagagtgtaccgctgggagcctggagccaagccctccctctgctgctgcaccctggggatgccacatcgcctccctgtacctcagtttcctcatctggagaatggggataaggacggtgcccacctccagggtcgccctgagatttaaggaggtaattccacaaagtgcttagtgcacgcatagcgagtgtcggccctgaggtctgtccccccttgtctcccccatgcccccttctaccatcacggttcttactcagaaaaggctgcaccccccacccaccctctccagcatggagggtcccagaggggccccacagagctgccaagtgggtgtggtggggcagggcatccgggcagcgtctgtcctctgtcaggggagtgcagagcatctgcctgcctcaatgtgcccccatggccccactcccactcacccctgctggcccccagacaggccttgccttcgggctgaggagccacttgggtcctgcaagggggctcctgggagcatcaggttccctcagcaggggaggaggaggccccactccaccgtctgtctgccttcccggcctccctcagatgtgatggatcgccccggcagaggaagctaagtgcttgcagacaaaaagcccttttatcgtcctcgggtgggccactggcatgacaagcagataactcagccacaggaggaaggctccccattaggccggagacggagacgccgatggacgggggacagagaggcagaggaggaggaggctgggaaaaacagcccagaccaggccgctttccttccaacttcaaagccccatgagcctaggcagaaagccctgctgagttcatcactttgtgggggaccgccaccgtcccactcctccttcccccacctccaaatcccactcctctttcccccctccctccaagtcccactcctccttcccctcctccctccaaatcccactcctcttcccccctccctccaaatcccactcctctttcccccacctccaaatcgcacttctccttcccctcctccctccaaatcccactcctcctcccccaccccagtcccactcctccttctcctacctccaaatcccaatcctccttcccctgctccctccaagacaaaacctggttgtgaggcccagggcttagggcccaaggcccagccccaggaagcagatgacctgcagggctgatcttccctcctgcctagtggggggcccccaaaggctcaggaagaagtaaagaggcctcctccaggaaaactcccccgaggtaactcagaatcgcgcaacccgggaggcccattccaagctgcctcagtgctttggcagggctgttccctcagcctgggtcacccttcccccagatacctacatgcttccttcctcccctacttcaggtctttgctcaaaggccaccttctcagggaggcctaccctgacccccactttgaaactgcaacccccagcccacccacaggctccccagaccccttcaccacttgttcctcagcctggtgctcaccaccaagagacccgctaagcgtcgcacttactgacttttggtcatggtctgtctccccgcagggaggactaggtgcttggccgtcttgtccacaggtctattcccagcacccacaacagagcctggcacacagtaggtgctttagaaagagccattccataaacgaatatatagtcatgtactgcttaaccacggggacacgttctgagaaacgcacgggagctggtgctgtggctgtgggagcacgatgggggtggacttgcacaaacctagacctcagtgccagcggtacacccaggttgtgtggtgtcatccaagctcgtccaaccccggcccaggatgcctttgaatgtggcctgacacacatttgtaaactttctgaaaacattatgagacctttttgtgattttttttttttttttagttcatcagctatcattagtgctagtgtattttctgggtggcccaagacaattcttcttccaatgtggcccagggaagccaaaagattggacaaccctggtgtagccgacggttcccaggctaccacctgtacggcgtgtggctggactgactcccacaggcagctagaacccagtggtacactaggtatccaaacacagaaaaggaacagtacaaatgtggtattctctgggcttggtggctcacacctgtcatcccagcactttgggaggccgaggcaggaggatcacttgaggtcaggagttcgagaccagcctggccaacatggcgaaaccccatctctactacaaatacaaaaattagccaggcgtggtggcgcacgcctgtaatcccagctactaaggaggctgaggcaggagaatagcttgaacctggaggcagaggttgtagtgagccaagatcacaccactgcactccagcctgggcaaccaagcaagactctgtctcgaaaaaaaaaaaaatgtggtattataatcttatgggaccactgtcatatatgcggtccatcgttgaccagaatgtcgttatgcagcacatgactgtatttggaacaagaatgaaatctcccgacaacagcctgtcatgagccagaacacgctgtgtgcccgccatgtgccccagcctccatgcgcacgagccctgcaatgccctcagcgaccatctgcctggctgggaaatgagcactccgggagaaacttgctgcattccctgggaagggtgagaaggggttctttgcttctggctctttgcttccagctgaaagatctgggacaggtgaccaacctgtgcctcagtttccccacttgtaaaatgaggcaccacccattctggagtgttgctgtgagggtcacaaaatggggtgacctgtgaaaagcacgacctgtgattatgactcaccaggcaccttctcaggccaggcactgctctctatgagcattaatcaccgcagcaaaaccctataaggggaaactgttattgcctccccgcccagtctacagatggagaaacagagatacagagagataaagcaacctggccccagtgcccagcacagaagtagcagtgataagaccaggacccaggccacctctttgcctgctaggcatggggaccacagtggtggttcagcctcagggcttcctccagcacccaacacccgaacacctgggcccatcgacaggccccaccctggccaaacctgcgggcccaccgccaaagcacaaaagcaatgtgaccaagaaccccggagcccggggaagcccaccctcctgacactgacactgtcagggaccctcccacctctcaggtgtcatcaaaaaatcactgcaccaactcagccaggaaacggcccatcactgggggaccccgcaaactgccctaagttgctccctgccctggacagctctgatgtgccagaccccacacgccccccgaggcccccaccacacactccaggccgaacctggctccgagtaattccagacccacttcccgtgagaaagtccaggcaggatgaacctcctggggacaccaagtggagacagacatgaacctaccagaaactgcctccagcgaggctgtgtcctcaaagactcagggagacctgcggacaaaacacgggttttgttagttgacatcgcatgtatgcagtttggcatgacgacaccgacatgcaggaaaaaagaccatgtctgccgtcagggcccatgtgtcgtaagcactgggccaagtatttctccatgagaaccctgtgaggcaggtactgctacctatttgacagagagggagactgacgctcagacaatcaaatctcatgcccaggttctcagagccgggaagtgacggagctgtgattcaatcccagatgtgtgggtttaaaggcatcccacaccctggcaagaccaccgaggggccccgggccacacggctaggctactgggaaactgccccattaactacccagaggaccccacaaacagggagatgggtcgacggacacctgaaggatggggtccgggggtgggggtgtctactattctcatgcaagaatttatttttgtttgtttggtattttggagtgtttttgtttttgtttttgttttggatatagtctcgctctgtcactcaggctggggtgcaatcatggctccctgcagccccaaccctaaggcgatcctcccacctaagcctgctaagtagctgggactatgggcacgtgccaccatgcccggctaatttttgtatttttttgtagagacagggtctcaccatgttgcccaggctggtttcaaactcctgagctcaagcaatcctcctgccttggcctcccaaagtgctaggattacaggtgcgagccactgtgcccagcctcatttaagaatttctgagttaccatacaaagtcaaaagtagtgcaatgatagctagtacccagaatacagaggggacacccacaaatcaatatgagccagtcagtccaacagcagacaggcaaaagacaacatagacgcttcaccaaagagtacatacacatggccaataagacacgaaaagatgcccaacgtcatcagtccttaagagagggcaattaaaaccacgaaagaccactgctcacccatagggatggcaaacatgagacagacaacatcaagtgctggtgagaacaaggagcacctggaaccctcacccgttgccgacgggatgcaaaatggagcaactactttgcaaaaacagtttggccatttcttatagttaaacacatgcttgccatatgactcagtaattcaactcctaggactttgtcagacagacatgaaaacagccacacagactcgcgcacaaatgttcactgaagctttatgcacaatcgcagaacaactgaaaacaacccaacggtccatcgacaggtgaacggataaacagtggtacatccatgccatatgactctgcaatcaagaggaaccaagtgcagacacacaggaccacagggaggaatctgagactcaggctgtgtccaagaagccagattcaaggctgcagactctatggttccacgataggattctggggaagacaaaacaactttcacatttgtaaagaggcctgcagaggtagtcaaatacaacaaaaaaaatgtgattcccacaaatgttaggacgccaatcacctctagggagaaggcagcccatgtctacaaggtgacccctttataattgttcgctaatctgcactgaggggtttatacattctttatcgtgttaacttctgcatgaaaagaacaagtaaaaaatagtacagagggcagagcactggacagtcagtctcaacggacctctgggaaaccccttctccacctcgtgccaaagctgagggatcggggactggtgaggccagggctgccccctcccacaagggagcagctgtgtgcagtgctcaagctctgaagccaggctccccaggttccaatctggcctccaccctctcctagctgtgcaacttggaacaagcaacttcacctctctgagtctcagattccccatctctaaaatggaaacgatcattttaaaaatgctgaccccacaggaatgttgtgagtgtaaagtgccctcagtgccagtgtgtgccactccagtgtgtgccactccagtgtgtgccacttcgagtgctcagttcttgctggacatgactcctacccccacccaggggctggcagccaagctccgagaggccagccctctccagtgcctggcaggccctcaggccccaaggagggagcctttgaaagggcagctgcgggcagctcacagggggacaagccagccacttctttcctgcccttttttcttttttaagcgtttttttcactatgatgcccccaggcttggcacttggtcctgccatctgcatcagctccagagacaggccctgcaggaaggctggaaacagggagggcccgggcacatcttcacagccgccctccccagctcccggaagcctcggtggccagccacctgcagcacgtcccgtcacaggctagggcagagccaggcctggcaggcgctctccctgggcaccaagaagctctcaacctccacctgggagagacagctgggagatcagaccccatcttctcctaacctgctcccaaccccagccagctcagcctgcaatccccaacagacagagtcccagggtgtcccggtggcatggggtcaaggccagtgggggctggccccaaggtcacattgtccagagggaaacagagaatctcccagcagtaatggagtgacacataggtccaaagaggggttcccaatttagaaaactcagcagggacttcccaggacaggcaacctgtcacactggccagaatccagggagatgactgaggggccaaggggggtagcgaggactgggctgaggtgggaaggaacccagggccctggctggagcagagccagggggagaggaagagagaggagggctggaggcagcaggggcgggtcacgcagggttctgcagatgggttttatctccagagcagagaaccttaggagggttacgcaagctgcagaggggcaaggtcccactccaaagtggagatgcatctggccgtggagcgcgggtgagggcagaagccacagccaagggagaggccactgtgccagtccaggagagtgatgtggcgggcggccaggctgggcgcagcgaggtgggagaggggctggcatggagagcatcatgcattagagagtccgaaaggcaggcaagcgatggtgagaatcaagaggcccgctcctcctctctgaccctgggcagagctagtcggggagggaaggagagggtgacaacatccacttcctgcacaggaccctttcaggggcacagccatcccgtgtccctggccaggaaactgctgctctgagggaggagtcacccaaggccacgtggcaaggaagggagtgagccaggatccaaacccaggaccaagtgcttgggccatggggagccagggcaccagggcacagggctggcagcgtggagtcgaggctgctccagcccaggctgcccgcgagcggccagggcatgtgggccacagtgtggactgagccccacgcctccccggcagagccgcccccgtcagggcttcccggggccgggcgtctcccagctcagccccgcagcagcaggtctcactcgctgtgtcacgctcccctgtgctcacacccaccactcactcgctcaaggccgcagtcgcacttgctcactctgctgcactcacattcacactcattcacactcgtgcacacccggttcacactcaccggctcggggccacccacacacattccagctcaggcccaggcccactggccggctccgtgggccctccccgcacagcatcccaccagctccttcatgctcactgtcccccagcaagctcccacgctccccctcaccctcccaggcaggctgggggaacccgggcaccccccattcctctgaagccaccagctcagtccacccacagctggaagaagggccgggcctccatcctcgcgcccctggggctggccaggctagtctcccggcaaagcagatgcacggggagagcaaggaccagttccaaggctcccctctgccaagcccaccatgaccacgcatggcccacaggctgagacttgcccccacctgccagcaccccccttgtcagctcccaaacaagcccacctcctggcgttggcttttaccctcaactctaccaaacgcaccgtcaccctgctctccaccctgctggaaccagaacaagcaccatcttttcctcctccaggaagcccgcctggctcaccccagccacaaaggccaacctgactcgtccattcgccacacccagagatgggaagccaccacccacagccacacagctgcaagaggcagagccagccgacattcaaacccagaggcagcttcgacctgcctcgaccaggacaccatcaaccttcagctgctcaacaaacagaggggacagaccccctgttacctgccaggtacaggggcatgactgcgaacacaaaagctgagggtcttaggggccaaggtcacacacacacacacccaaacaccctccggtacacccataagtgagcaaggtgattgcaaagagtggcccctggagtgacggacataaaccatggcgacccagcagtggtgggagggagggcagggagggcagggagggccccctgcaggaggagacactggagccaagcacagagggccgaggaacaggtgtccatgaggaaggaaaaaagagcactccaggcagaaggcacagcctgtgcaaaggcccaggggcaagaaccagatcagagggttagagaagctggggcagccagagggctggggagtggagaactggagagggttggggagtagagctggagggggatggaggtggagagctggagggggatggggagtggagctggagggggatgggagtggagatggggggatgggggtggagatggagggggatgggaggaggatatgcagggggatggggagtgaagagctggagggggatggggtggagaactagagggggtgggaggtggagagctagaggggggtggggagtggactggagggggatggggagtgaagagctggagggagatgggggtggagatggaggggggtggggagtggagagatggagggggatggggagtggggagatggagggggatgggggtggagagctggagggggatgggaggtggaggggtggatatggaggggaatggggagtgaagagctggagggggatgggggtggagatggaaggggatggagagtggagatggagggggctggagagtggagagctggaggggggtggggagtggagagctggagggggatggggagtggagatggagggggatggggagtagagagctggagggggatctggggtgaagagctagaggaagatggggaatggagatggagggggatggggtggagatgaagggggatggggagtggagatggagggggtggggagtggagatggagggggattgagtggagagctggagggggatggggagtgaagagctggagggggatggggagtggagagctggagggagatggggagtggagatggagggggatggggagcagtgatggagggggatggaggtggagatggagggagatggggagagaagatggaagtggctgggggtggagagctagagggggatgggggagatggagggggatggggagtgaagagctggagggggatggggagtggagatggaggggatgggaagtggagagctggagggggatgggaagtggagagctggaggaggatggggagtggagctggatggggtggggagtggagagctagagggggatggggagtggagagctggagggggacggggagtggagatggaaggggatggaggaggagatggaggggtggggagtggagatggagagggaaggggagtggtgatggaggggtatgaggagtggagattgaaggggatgggaagtggagatggagcaggtggggagtggagatggtgggggggtggggatggagctggagggggatgggggtgaggatggaaggggatggagagtagagatggagggggtggggagtggagagctggagggggatggggagtggaactggagggagatggggagtggagatggagggggatgggggtggatatggagggggatgggggtggatatggagggggatggggagtggagatggagggggatggggagtggagatggagggggtggggagtggagatggagggggtggggagtggagagctggagggggagggggtggagagttggagggggatggggagtggagagctggaaggggatgggggctgtgttcctggccacaggaggggagccacgtgctccagtggaacacataactgagtaggaacagtgtggggcagggccagcgaggacacctttgggtcaatccctgagggctccatggaggcatcgacctcttgccctcccagacccagcctcagcctcttcctgcatggaggatcagaactgtggggctccagcctcaatgctgggcaagggcttggtgtctggactctggagcctttcccaccagacctgcagcagccacaggaacagggcgggccattgcctcggggctcctgtgcctccaggacccatgattactcaagcccagggctcagtataaatcctccctctcagcccagcctcccctgaccagcggccacaccggccacaacagccacacccttggcagggccacatgagggacatcttccagaagggagaaggacgggtgttgattgagcacccacagggcccacagagatgggcgaggtgggcgacagcagcccaggctccactccaggccacctctgccctgggcaccgaggccaagaccctcagcgcccgtcccaggccctaggaacctgccaggccagcatgagccagcctcggggcgtgctccgcagaagctctaaactggaccccgcagacccacagatcagaccctggcccccaaggggcaggcatgactcccagaagccttccctgcaggctggagtttggggacttccagcacagcacaacctaggtgccgtgagacatggaggcggctcaccgccctcccagggccggccggggtccaccggatacatcttcccacacggggtgaacaaggagcctcccctgtctcctgcagtggtgtcacctggtccccgtccctgtggtagccagcagtccagacagccagagcgggagggaggcaggctccgcagcccttccattgagaagccgccgggatatgttttccttctccagggacagctgaggcagcctgccccgtgccagccctcctggaatctgcagaggcagccacccagagttcaccaaggtctcagtccccactggactgcaacagccaagggcgggtgggtgggcgaagatgggggtcacagcctctctccctcccatccctcctccaccagctagggcaagggccaccagaccaaggccaagggggctggcagcatggatgtgagtgatcagggcctgcaatgggatcagtagggaggtggggatgggccgcagccccgtccagagggggactgaggagcaaccccgtgccctgcccaggaacgcgccccagccccagggccacctgtctgctcccaacaaggaaggctgcactgacaccgggcatagcgactggggaggagccgctgcaaaaaaccatgacaacgatcatcacaataataacagccctcacttcctgccaggccacgtgcatctccactgtccggaccctgtttcaggggtggggaaacagacccacacggggttacctgccccaggtcacacagccagtgaggggcggggagacgggaccccgagcatctgaccctctgccctcggccactccattctccaccccgacagcgccgtggatttagcagggactaggcttcccagaaacctcgccgcccctctcctcgctgcggggtgtggggccgccatcagagacagcagccggcaggagcaattagaggccaggaaggagccggggtatcgaccgcttttgggagggaagggggacgcgggctctgtcggggtggcagcagcctggctcatggccaagcacgggccacgacagggcagggagcgcagcccaggccgggaggccgcggaggccccacgcggcagcacggaaaggccagctgtccgtccacctgtctgtccagccccctcaccctcacaggcaccgacagcccctcggtgcctgaagctcagggtttcgctgcctccgcacaatgctaagccccttacgatgattaactcgtttaattcttaacaaccgccccacatcctccccctgtgcagatggaggcagtgaggcaagaaagccctcccagagagttcccaggactgggatccacactcagcgtcagtcagcaccagcgacgccgcctctgcccggcaccccctgcccggggagccccagcggggagggagatgaatggaaagggtgcactggagactgctggatgagatggaagcttcgggaaacctctctatgccccgcagtgaccctgtctgtaaaagaggaacatcacaacacctgcctcacagtatgctgtagatgaactcaggtttagccccacagataggcagagcaagtaccccaaaatgtcagctgctggcttctcccagagaggctgcctggcctggggacccctgaatctgcagctgaacagaaaaaccactgcagactctccccagcctctgccccgggctgcccgcccaggagcagggtctggcctttagaagctccctggagggcgggggcaccatccgccagaagcaattaattgctgggtcaagagatggtgaaagagatttgtcacgagggcctggggatattcagggtgggagggtggcccacactgattcagttgccccaccttccacctcacaagcaggctccgcccccactcaaacccccaggacatcctcctctgcctccacacccgcccgggcccagggtaggtcagggatgcagccccagcacccgtgacctgctcccaggagggacctgcttccaccattcagccggtgcccacacacaggaggggacagccaggcacaagtggggctgacatacagagtccccggtgggccccaaatgggcctgagacccagatcaaatccctgagccatctcatcttggcaggagactgcgacccctgtgtgtgctgctcaacttcgcagaggcagtttcctctcggtgaaacggaggcaattatattaggtggctaaaatcaggctggctcccgctccagccctagtgctgtcattttttaaagcctgaggaaggtgccttgcttctcggaacctcagtgtgcccatctgtaaaacggggatgatgccaggggctactctgaagagaaatttacaacctggcacccagcagtgctcagttgaagctcaccatcggggttcaccaggccacctccccagggccccttgccagcctgcaaccctactgagacaccaatgtccccagcacctcgaacacccagaagcggggcccagggggagggagcagagtctcggagggccacgatgagaggactggataagagcccaccttccctgcctcccacctccgcagcaggcccaggggaaacataggctttggtgaccaccaggctggggccagaggccagtgacaacagaagcacccagagacaaggcagcccctgacccagatcttccatgggcagggctctgcaggagcctctggtctggaggggtccgaggcacaggtttccccatgggtccccatcagctttcagcccctggtgtccacacccaatccctccacaccaacccaccgacacacggggaccctcgaagcccccaccacacagatgggaaaaccaaggcccaaagacgccaggcaagggcagctcagcccgggatctttctcatgtaccggtgagctcagctcagcccagcaggcgttcagaagcccaagtggcccggctggggtcagggccctgagtcagagcaagaaacgcagcagaaactgaaacagcccagtggccccacatactccacagagtgagccacgctgcttccctgcgccgccccgtgctgggaagttcttgcttctgtggtcagggtgagggtgggggtgggggacgagtggcgtggaacagcctttcagcctggggaccctctctgggcccggcagatgagcaaagttccatgcacacaggcagagctgtgaactggccccacctcagagtctccgtgtcacccaggacacatgcaaagccacacattacctggggcagcagttcaggggtatgcataggtgaagcatagacaggcaggagagacccatcccaggcacaggctgtttctgctccctgcagggctcagcctgcagcaaggccacagagcacaggtctcgtgatctcaggatagggtctgagacccgggttcaaaacctagctgcactgctttctagctctgtgaccctgggcacgtggcttaacccttccgagcctgcctgtttcctcgccgtaaaatagaaactcagctcacagggctgactcagaggctcagtgagcgaatgcctgcctacagtaagagtgaatgcccagcatacagtaagggcttaataaatatgtacagcagttcctgcttagccacggcagctttccacagtttcagtatggtggtctgaaaacaaacggaaaattccacaaataaacaattcgtaagtttttgggttttgggtttttgttttgttttgtttttctcactctgttatacaggctggagtgcagtggtgtgacctcagctcactgcagcctccgcctccacctcctgggttcaagtgattatcctgcctcagcctcctgagtatctgggattacaggcgtctgccatcacgctcagctaatttttgtatttttagtatagtcagggtttcaccatgttggccaggctggtctcaaactcctggcctcgagatccacccaccttggcctttcaaagtgctggggttacaggcatgagccaccgcgcccagccaattcctaagttttaaattgcacgctgttctaagtagcatgatgagatcttgcaccgtcgcgtcctgtccagcccaggacatgacccctccctctgcccgggaggacccactctgcagacggtcctgcctgtgagtgtccatcccgggaatcagatcaactgtgatggtagagcagtgcctgtattcaagtagcccttatctgactgaacaatggccccaaagcacaagagtagtgatgctagcataccgttaacattgtctttttataatattttatttatttttattttttttgagatggagtctcgctctgtcgcccaggctggagtgcaatggtgcaatctcggctcactgcaacctcgacctcccaagttcaagtgattctcctgcctcaccctcctgagtaactgggattacaggcactcgccaccacgactggctacattttgttgtatttttagtagagacggggtttcaccatgttggccaggctggtctcgaactcctggcctcaagagatccacccaccttggcttcccgaagtgctggggttacaggcatgagccaccacacctggcctgtcctattttattattagttatggttgttaatctctcactgtgcctaatttgtaaagaaaaccttgtcataggtctgtatgtgtaggaaaagatggagtgtatatagggttccatactgtctgcagcttcaggcatccactgggggtcttagaatatatcccccaagattaaggggggactactccatttttttagttcccacatttttcaaatggagaagaaattcacattacataaaattaaccactataaagtaggcagctctgacatttaggacattcccagtgctgtgcgaccatcacctctatctaattccaaaacattttcatcactctaaaaggagaccccatcaacatggagtaggttctccccaggtcccctccttccagcctctggcaaccaccaatctgctttctgtctccatgggtttgcctgttctgggcatttcatgaaagtggaatcgtacactatgtggccttgtgtgtctggcttctttcactcagcatcatggtttcaaggttcacccgcagtgtagcatgcatccgtacttcattccttttcatggctgaataatattccattgtatggagagaccaatcatatatttttatatgagaaaagtgtgttataaagaatacatattcatatatataacaacatatatataaatacacatacagaatgagatataattctaaaacttgtaaggttataaaataaccataagaactatgatgatgtggaatctggtgaaggagccagctggtgggagagaggggcctggggtgccccaggccgggcaggtcccctcctatgggacctctcctccactctaactctcctccacatcacatcaggcctcctaaacgtgcactgagctgggacctgaatggcagcaaggagccagctgtgtcaatatgcagggaacagcattccaggtggggggaacaacaaacgcgaaggcccagaggcagatgcggtcggtgagggctgaggagctcccgggtggcctctgaatttattctcagagcagtgggaagagaatggagagtgtggggccagagtctcatggaccttctgatgggatccctctggctgcaactcagagaccagacaggtgtgaccagagtggactggggaccccgaagaggctactgcagtcgtccaagccagacggcgacagagtgggggtccatcatggtgcctggtctgccattcttttctttttgtcattattattgatatgaaaacagagggtctcgatggcaatgctgttcccccccaaacatagttactgtttattattattccatctcacaataacagcatattatctttactgttcctgttatttttttctgtgctgttagggcggggcgggggatctccatggcagggtccccaccccagggatgtttttggctgccccatgactggctcatggcctttgggacagtcctactccataaaagtcaccctccctacacagttttcaaatgacctggccattcaaaaaaacctgccagaaccagtccaaatactagctgtttcttaaatgtcactctcctctccccccagcactgcagggctctgatctgctttctcgcgaatccacgcttactcattctgagtgggagccagccactcctccctctcgtttccccgcttccccttacccgacggttggggcaccgcacagatttttgctgttgttgttaattctgtgtcgagtctagtctgtattaaggaggaatttcattgcccaggagtagaggggatttcccaagtctatggggtaaatattgtcagggtggttgggatgcagtgtggcgctgagccagggagctaacctctctgagccttcgctgcttgcctggcaatgatgatggttgctgggtcacgagatcaccgagaggatcagatgaattcacgtggcatgtgccgcactgagacaggcaggcacgcagctgaggggctggcggtgggaggggcagggccgcggctggaggataaaatcccacactccccgcttggccgggtggcccactgcccgtctggctttcgaggagataagccgcctgctcaggttcacgttcgggatcaaatgaacccacttaatccccctagggatctctgctgagctggctccttgggggcctggggaggaaggcaactgagccccctgcagtagaaacccccacccgcgaggccaggcacagagaaggtaccaagggcttctgccccagcgccggggcacagcgggctgagggagccccaggacagaagcggtcacacatcatgggctcatcatcacagccacagtgactcctgactccccactgcaacccaggaggtaaatgctattacgaacacccttctccagatggggaaaccgaggcccagaaagaaaacagcccgcctgaaggtgacagagcgcctcgccgtatcaccagcaacccctcaagataaccttatcacgtttcacggagggagagagggcggcaggaacggggccttgagtcaccaccctatcccactgggaaggcaggggtggatgggcagagtgtcacgcctgcctaggggaagtacacgctaggtacttatggcaagtatgtgaatgaacaaaatctacatgctgggcgcaagctccgaggaaaactccttcgcaggacctttctcccctcctgaggtccctctctaagatcctgtatcgcaggggtctggcgggagtgactgtgacccccagaggaccgcaggcaatgtctggaggcatttctggcggcagcaaagggggctgaggtgctactggggtctggtggatggaagcaggggtgttgcccagagcagcccctgcaacagagagtgacccaacccccaaaacccgaacagtgcccaggctgagaaccctgccgttcttaccaaatgcatgagagtgtcagttgggcacccactgtgtgcagggcctccctgcaggacacattcaagaagacgaggtcacagggctcagagaggcaaggcttcctgccccacctaatggaaggaaggcagaggcgggacctgaacccaggtcccactgactcacagccccaccccagctgccaaatacctgccccatccttcaggagtctaacctactgggtctagagtgggggctccacaatctgtatatctcatagctccttcccccagcagccactggcagggggaggatggtgaacgggggggaggacagctctgttccttttcatcagaaactacattggccaggaggctggcagtctctctctggggggtaggaacgtggttgtattttttatgtgcaagcttttccttcctgattttccagcttatagagaacacatttgttctgcttccaaaaaccaaaaacagtcttttatgtaaagcagctgccaaaccacatgcccagcctggccctgggtggctccactaggacctggcaggggggcccacacctcaatggagagagggctgacccagcaaagcccccgtggagcacccctggcatcaccaggagaagcccagagctggcaaatccactggccacggcacccaggcacccagaggtgctctctagaaagtccccggcagccccttcccatggcaagcaccaagtagctttctccaggaaacacaccaagctcacgtcacatccccatgacaaaatactacaagaagttaaaattagccaactggatcaaagctggtttgcaccagcacatggtgaaaacctgtaatcatacagataaaaataatgatagctaatgccacggttctggatgctgtgtctattacccttctaattctcaaaacaaccctagaaggtgaggactgcttaggtcctcattttacatattaggaaactgaggcagagtcatgtgataaggtgcatgagaacaaagtgtctggaaccactcaggtctgccgcttgtctagccgagaaaacgactgcactgaattatatacaaagctgtcaatactcgaccacttttgacctacaaaactagcagtcatacggctcccccagtagcaaacaggagagcagcgcgcacagatccacgtgtccacagacaaggcaggttcccaggccgtgcagcgatacacagaggctcgtggaaaagcccaggccccagtgagaggcggtggcctccaggaagggggctcccgtgacttgaaagtcacctgtcatttttttctcttttaacaaaagccaccttagcttacagccccgagtctggtgtcctgggctaaggctcggccggcctggtctccctctctcctctctcccctggccgcctctttgcccccaagaccccacatagtctgtgacaagccagtggtcctcctcggggtctgggacctggagtctcttccagcagcccaggagaacctctccccactaaggatcgagtttcacttaattgcaggcttcaggtttctgcatgcaggcccagaggcctgggggaaggaggcgcgggccgttttcttcctctttttaataagctggaaggcagcagcatgtgccctgctgttctgagaatccggaacacccgccccttgggaaaggccgcggctccaagagcccacatgggagacccagccgggagaaatcaactgtggcttgtcatgagacatgctggggacttatttattttctggtcaaccattgggaccaggtactccagctggacttaagggattaaaaaaaaagaaaaagtaaaaaggggctgggtgcagtggctcacacctgtaaccacagcactctgggaggccaaggcaggaggatctcctgagctcaggagttcaagaccagcccgggcaacataatgacacctcatctctactaaaaatcaaaacaactggcagagcatggtgacatgtgcctgtagtcccagctactcaggaggctgagatgggaggattgcttgagcctgggaggtcgaggctgcagtgagctgcgaatggagctggactccagcttgggcaacagagcaagaccctgtctcaaaaaaaaaaaccactaaagaagagaaaagaataaagaaagcacaaatgtctctctgcctctgtgtgtttcttttacattttgcttttcactagcacagccctttaccgtttgcaggtttctctcttcactctgtgctcttcagccacagcccccaggtcaaggtcaagaaactgaggggtcacttaattccaaggtcaccaatggtaggaacgcagccattgtctccatgaccacatcacccacggccctgttcccggttgctggttcacagggaaatcacaggctctgtgggggcagcaagcatcctctgtaacaatgaccacaaactcggtgacttaaaacagcacaagttttttcgggggggttaggaggttttttggttttttgagacagggtctcacttggtcacccgggctggagtgcagtggcatgatcacagctcactgcagcctccaactccagagctcaagtgaccctcccatctcagtcccctgattagctgggaccacaggtaccatgcccagctagttttctatgttttttatagagacagggggtcccactgtgttccccaggctggtcttgaactcctggcctcaagcgatcctcccacctcagcctcacaaagtgctggggattacaggcgtgagccaccgtgcccagccagcataagtttattaccttacagttttggagatccaaggtctgaaatggatctaacagagctaaattcaaggtgtcggtaggctgcatccagtctggagactctaggggagaacctgtccatcaccctttatggcttctagcggctgcctgcactccttggctaatggccccttctccatcctcaaagccagcaacgcagcatcttcaaatctctctgacctcctgcctccttcttataaagaccactgtgattacctccagcccgggcagataatctaggataatctcccatctcaaggtcagctggttagcagccttaattccatctgccaccttaaatcccctttgcagcataaaataatatattcacagcttctgagaattaggacatcgttcgggggaccattactcagcttaacacaggcttcaaaaacaaaaatctttaggcctctagggaactcccaaggccccaccccacagattctgaactcccaacaggcgattccccagggtccacgtgcctcagtctctccactgctacacagcatgggtgagcatgaccagtgccagcacctgtacgtgaatacacgtccccagcagtgcagagtccagcatctgatgaaaacgtgatcagacagagccctgtggcctaacactagagacttccctctctagattaacaacaaagaacttatcaatacttttgagcaacgttttttttctgaccagtcacaaatggcccgattgtacagcccatgctctagtaagatccataagaaatccccccactgctgaaacctacgcttcctcacgtccctgcatgccaggttgcagaaggctttgcagggtagagctgagctgctgtggggcacccacgggaggagacgtccaagagcccgagctgcatgcgcccccactccgcagctggtgtccctcaaaatggggagtgggggagctggggaaccagaggccacccaaagctgctcaggatgtccttggcatggtcagcaccctcccctgcagctcctggtgactacgctctcacaaacccccactcaggagccagggccccggggcaggccaaaaaggaacagggtgagccctgccccataagcacataatggcgtgagcagcgtgaaccctcctgatgcttaaagatgaccgagggcacgacaaaacgccttccttgcttcaaagcccttttgcgtctctttcctgccagaggtgccgcgaggtggcatcactcccatttcacaggtcccagagacgctgtgcaaaaaatcacacagcaatctggcagtggggatgggtgtccaaggctccgtgccctccccatggcccacctcccagtctggggccctccaggcagttccacatcgtcatggccctccagcctcccaccacccagctgggcatccagacagggaatatctcctctgggaagctcccctccccaggttccctcggtgccccctcccactcaactcccctctctccaaggcaaaagccaggcgcccccttctcaatgtcaaacctcatgctgtgccctccgcacctccaagcacccccaggcactccttacagcaccgcgagcacagaggcggcctggacccacggacgggggctgtgacacagagagggcagcgagagcctgaaggtcacacagcaaaccagagagcacacacccgatgcgcagcacgcttccaccttccacgttcccactgagggccgcacagttccgggaggtgccgctgcggcaagggggcagcgcccagggcccaggtgccgggagatgcagcttcctgcccgccgctacagctgctatttatagctgagcagggagaagccaagacagacagggtcagcttcctgcacagcagagctggccgcagcctgggagccttcgagggtgacccggaggggaatgggttgggtcagggcagagacgtgggctttgatgtccaggattgggcacgtggtggacccaggactgtccctggtcactcctgaggaccacagtccaggggaaagggatgaaagcacacaatgggccctgcccatgacagctgcccaccaagcaaggagcttaggagctgtgtgtcctgagccaatgatatcaccactctgtgcctcagtgtccccatctgtaaacagggaaactaatagttctggccacaccgggttattgtgaagcttagatgagctaacccatgtggtgccaagcgagcttgcctgcatcctaccagctcagggccctctctggagcaccctcacctctgcccctccctgctcagacaccagacagcaacgctggggcagggggcacccctgcaccaggacacctgcagaagcagctctccctactataccctccagtgtgtgcacagctcacaaagcccagggagcccgagcaagtggcaggcacgggggcatcccgacccagccccagggcacagacagctgtgacaacgtccgcaggatgtatacatgctcgggtgtcatcgccacagcagtccccccaagcgtccactcccctacgcaccagggactgcagttacccccattctacagatgcggaaacgagcacaaagtgacagaaagaactctgctgaagaaacgcagaggggccccccaccattcccagagttcaccagggtctcctatcttgccaaacagcagacaagtcttgctggccccgggaatccgcccagaaagctgcagtgggtttggaccccccagaacttggttccttggggagaggagcaagggccaggaaggatccgtctcgggccacccatccatgggaactcgggtttaaagtccctccccggtccctggggtcgcctggttgtgatgccccaacttcctccaaaaattggcaaagggaacacccacacggcaaactgaaaacagtaagcactggcccagcccacatggaaggcttctctgtgctcccagcgtcaggcaataagcaccttcatgtaggacctcccataacgctcaagacaacctcgagagacgaggaatctgattatgcccattttatagatggcgaaatggaggcgtgaaggctgaattaggcaaaacgtggttctcccacaccctggccactctgggcctctctgtgggcttatgttcacccgtggagctcagaggccaagctcagtgctagcaaggggtggtcacggccaccaagggagggacagagagggaatggccacaggctcagtgacctggaggctctgcgggagcaggagggggccacaggtgagggagggtacaggtgtcagtcacagggatggatggacaacctgggactcccaacgggcaccagggcacgaggcaaggccatgcccagccagagcccaacactcaacacatctacgaggcacccacagtgtgcccagcactgctctagaacctgggacacagacagacgtctccacccttgtggaacgtccattctcgcagggatgacagacaacagcaagatgacaaacgtgtgaaaccatcatctatcagaaggtggcacactgggaaacaaccgagggagggaggggagagggtgcaattttcaatatgaaaatatcaggccaggcgtggtggctcacgcctgtaatcccagcactttgggaggccgaggcaggtggatcacctgaggtcaggagtttgagaccagcctggccaacatggcaaaaccccatctctactaaaaatacaaaaattagccatgtgcgcctataatccgttactcaggtggctgaggcaggagaatcgcttcaactcaggaggcagaggttgcggtgcatggagatcatgccactgtacttccagcctgggcaacagagcaagactctttgtctcaaaaaaaaaaaaaaaatccgagaaaaatggcaaaggaatgagacgaggcctgcggataccaggaaagagtgctccggcagggtgagtgcaaaggccccgtggcggaagctgcctggtgcatttcaggagaaacagcgaggccggtgtggctgagacagagcgggcaaggggagcaggtcgcagaggacggcccacgccggggcagagggtagagcctcacggcccaggtagggaatcagctttcagagcagcagcgggactgtcctgccctgggttttcctgccctgggttttacaggcctccccctggctgccacgtgggggatgggtctcagggtgaccagtgaagagccagctgtgatgggagctgtgttcccttcctagaactgctgtaaacaaagctccacacgccggggacttaaaacaacccactgttactttgtcacagttcgggaggccagaggttcaaaatcaaggtgttggcaggggtggttccttctggaggctctgcgggggagtctgtcctgagccttcctcccagcagtccctggcacttcttggcttccagccacatcgctccagcctctgcctccattatcgcacggccttctcctctgtgtctttttgtcctcttataaggacacgggccactggatttagggcccaccctgctccaggatgacctcttcttaattaaacgcatccacaaagaccttgtttccaaataaggtcacagcctgaggttccaggagggacgtgaatgggtgggaaggtggcacaggcactgtccaacaacatgcagcagcctaggccaggggatgatagtggcagacgatgcgaaaataaaaatatccaggagggtggcagatggcgtgggtgggcgggatggcaggttaaagcaggtgtctcccaacttctcccgcttgccttcctcccctggtttacccagcagtgggcatcacccaggagccaccgccacacagaattcctcccaaatcctgaccctgtggacctggccaagcccccaggacccaggaaaggccccctgactcctgccaggctccagagggcgacatcccctgcaggcccccatgctgacaggcctggcccagcctagggaaaagcccaggccagggcctggagctgcatccggccccaaccccacccggcaggctctcctctttagcttcaggagcagggctggcaccaggcaggttcccatggtcaccgagacactatagccacactggggcccatgctccctgatggtctcagcaggtaccgcagagttcaatgtgaggacaaacagagtccttcgaggccctcccctgtgggtctgggcctctgggactaacgacttcagagcatccccagacagatcccctgggtcacaaagaaaaatcaactctcccacccaccccccctccagacctggcccaaggtctccccagccccaccacagaattgtggggagcgagccaaggggaggccacaggtgggcagatggggggcgtgcaggcctccttggctgtaagaaggattctgatttttgttcaagaaatggtgggaagccctgcaggctgatgaggtcaagtcactctagctgctgtggctccactgggctgcctgcagagaggggactgtgggtacaggatgacagccagagagcaggcaggaggcggctgcagtcccaggtgggccatcgagaggtggctgggaccacgtctctcactccagaaggacgcccagaacaggggcctgggggatgcgggggtcaatgatccacttttgcataggtgggatccgaggtccctttgggacatccctgagcaatggcaaggagactgctgggtccacctccctgaccctggggtcagtgccgtgggcccacgagtcacagtcaggagggagaggggctacgacacggtctgcagggacaattgcaccccaacgggcccctgaatgcccttcacttcacagcctgtgagccacgtgtcactcatcaccccatttcaccgccagggaaactgaggaactccgcgtggagcctttattattgcccaaggccatgtcactcagacctgtgggtccccccagatccactcatcagccctaaaatgcaaatataggccacggaaaaccaagtgaaccctgggagacaagaggcggagagggcctccggaccccagaaaagactgacccccaggagccacccggcctgcaggcacatacgcacagacacatgcaggccagtggtgactggtcacccgggtctggtccaattccacctccaacagcccaccctttgacttacctttccccccacttcctttccagatgcaaagaaaggccagcaggagaagcaggggacctgaagcatcagccacaagtccaggttggaaccagatggcccagaggtcccttggcttcagacgcacttgcaatattgcctccaaaacaatcccgaggtctccgggtaccacagtgctgagccccccacctccagggcattccctcaggccaagcagttctcgagggccccatccggttctcaaatgggacatctttcaccatccaagtcactcaccgtcatcttcccaagtcggaccccaaaaccgtgctcagttctcacccagggtctgaccttggttaagacactccacagggccagcctctggtttcctcctatggaatgctggtgcaggggatggtgcatgaaagcatcttgcaacaagtgttttcctttgctcggctcctgcctgatccattctgcccctcaagaactgagacaactctcaggaatgtgtaaggtaagataaaaatcagagagcaagctcagggcaaagggaaaaaaaatgagagacaaacaaatccaaaatcaggatgaagtagataaagccaaaacataaaccagtgattgcagaaagcaggctgcaaaatttggctctgagcttcctagtagccaaagcaaagagggaaacaagatggattacggctttggaaaattgtgaaaacgacgcagtgccacagagtaggtgctacagcaactatataccactctaaagtcaccaattaagaggccaaaaaattgtgccaaaaatcaggccaagtgcttgctgccttaaccatcccctctttcctactgcattctacaacagcaaattataaccatgagcatcagcgtaactcagcaagaacaggagcccaggctagaaggaggggttttagggcctacctggaatgaccttcaaactcacacccctctctgggccacagtttcctcaacagggaaaccgtgcaaggctacactgaggttcaaaacagtgaggtagtatattagggatcggcaaatatcttctgcaaagggccagagagtaaatattttaggttctgtaggccttccagcctctgtcacaactactcaactttgcaaacgctgtacccaaaagcagccacagacaacatgtaaatgagtgagcgtggctgcattccaacaaaactttatttatggacaccgaaatttgcatttcatatgatttcacatgtcataaaatattattcttctttcgatttttttcaaccattaaaaaatggagaaaccattctcagcttgtgcaccatacagaaacaggtggtgggctggccggatttggcccaagggccatagtttgccaactcttgctttctacgttccacaatcggctccgaaacatattatcacgtaggatgtgactatgacggcgaaaatcaaacctgaatatatggcgtgataccacttgcatgtttgtttttaaagggaacgcacacatacagtccatttaaggccgacatatgccaagagcatctcggaggaaactcaggcgcgggaagctgtgactgcctcggggaacagaaactgggaggccaggaaccgagggagacttttacgcaatgtgttaattttcttttttacaagtcaatgcattttctttcatttaaaaaataagcttttataaagcccaaagcaactggcagagttttgaatgcattactttttgtttttctacattctccccaagaagtataaaaagcaacattatccccaaaaatgttcatcaaagaagtccatgatgtattaagtcatatcataacaaaataagtatgatcccacttagagaaagcagataggtgtcttttgcaggtatctgcttgtgcagacagataccagcaagggtgctaacctaggattcctccgggtccggctgggtcagcccccatgaacctgcacaaaggtttttccacatgagctcagccccaggaggtaagaactgcccacacttcgcagggacctggagctgtctcctgctccaggagaagtgacagctaaggaaggatgtgggaagacggctccgtatagtaggagtcactatggctgcactgccccgtagggtcagtggccaccagccacaagtggctactcaaatttattaaaagtaaaaactaaaatttcatcccccggttgtggcactggcctcacttcaagccgtgactgccttggggaacagaaaccaggagggccagaatggaaggagactcccccaacagctttgggcagttttaatacccaatgccccacgtggctgttagttatggtactggcatatctagaacattctcaccaatgcagaaagttctattggacagcgctaccccagaggccggtgggagaggaagtgggggaagaaagagtgagatgtgggaagaggagggagacagacggcagggagaacggaccagcccagagggcacaccaggctaggtttgggaaaaaggaccactgaaaggggaagaccctccaggatggcaccacgcagagaaaacacgcatgaaaagggaaaaaaatcaggccagacgcagtggctcacgcctagaatcacagtgctttgggaggctgaggcgggaggatcacttgagcccaggagttcaagagcagcctgggcaacatagagagactccatctctacaaaaaattttaaaattagccagtcatggtggtgtacacctgtcgtctcagctatttgggaggctgaggcgggaggttaatttgagcccaggagttcatggctgtaatgagctgtgatggtaccactgcactccagccttggtgacagagcaagaccctacctcagaaaaaaagttggggtgcaggtggggcattggggaaggaatcagataccaagagcccaggccctgctccgaaacacagaatatgacttcatcacccaaccctgtgccctcgggttaagtagccattagccacagccacaggtggctgtttaaatttaagtaaattaaaattaaataaaatgaccagttcagctgctcagtggcagggacccacttttcaagtgctcccgagtgacaggcacctagtggctaaagcacgggacagcgcagccgtatcatctcccatcaccgcaggagttcccagacagcccgtctcaggctaccctctaaggcgggcattattttctttccctcccttttaagaatcaagaaaccaaggccagaaggtcagaggcttcactcaagttcttaacaaatggaagcacgattcaaaccctgctccttttttcagagaccaggagcagaggggaagctcagccctcccccagggggcctcccccaccccgtcctccccacagccttcgcccactctccgggctgcccatgacctccaagcactccaagtgcctgacagacactaagtgattaaagactaatggaaaacctcaaccgtcaagggcagaggcagggagctgagcacatttgtgaaacaccaacgaccaacgggaaaggagcccaccgtctccaaagggcaacaagccgaagcctggggctctggaaaagagacaggtccatcagaggatctttcccagcagcttttaagagggaggaatggttgatatccgagcagcctgtaggtgaggacccgggtttacacaaggaattctatagtgaagtctttgctctccaacaggataagccaaaatggaaactgcagctcctgtgtgtcctgcgacacacaggagctcattatatctcacaaccataaagtcagaagcagcagcagcacccccattttagagatgagcaaactgaggctcacaataggtaagtaactcattcacagcttgaagctgcagagctgaacagcaaacccaatattcatgccctttgcccctaaaggctctccaatatggcacaggtggccggcaatgtgcccattttgcagatgagggcacccaaaccctgagagcaaggggcactcacctgggcccactgcttgtaaatggccaagctggaacttccaatgctaaatcagcggctctcttggggatggcagatgaaacactccgagattgtcctctaatatctggttaggacaattctttctagatttataaaccaaaagctccttcctcaaggctagctggagccaagtgggcagggcagtgtggaagtgtccaggctcagaagcctcactctgctccaaaatagacatgataataacaatgatgctaagttcattcatcataagcacaggtccctccgctgtgcaacctcaggcgagcctggacctgtgccctcatctgtaaaatgggaatgaagccgccatctgccccagggcctcactgagcagaagccctccggctacacagtacccgagggcaacgcgcccagcctatgggcactccaggccacagaactctgccgctgcagctttctggagcaccatgctaaataattcaaaaccatgttttcatttcaaaacaaacacagcagtgtcgccaaggcgaatgccaaatttgcatgaatgtttcagataaaatgagacctcaaagaaatgccaggccctatccttctccccaaaccctggggagaacgagttctcagtctcctgccccacctggggcaaagatccgtaggtgctgctcaaagaagaaacatcatttctttcttcatatcctctacggcagctttgcaaagcaggtctgcagtaaattcctgctgcactaacacgaccgtgaataatcccaggtcttaattcgtagttccacatccaagctgtgtgaccttgggcaagttacttaacctctctgtgcctcaagttcaccatctataaaataagataataaaagcaccaactcatagaggagttatgaagagtaaacaagcagatttgcgtagagcacggttcctggcacacagtaggtgttggttcttattactagcgtatgatccacagccttttccaacatggaggctgagagttcgccggatgggttgtaaagtcagttccctggctccaagctccctcaaaagatgcccagctggcctttcccaagcatcacttccctggggaccacacgcacccacctagggacacagaccttctgtcacccttggcctgggcctaaaaaacctggctctccccaggcagcagctcaagcttggggccctccttgcccctcccctgggcacctcaggcaggagttaccagctcccaccggcagttccccagtctcaaaagtgtcacctggggaggctgctgtttagcgtttgagatgtgaagaggaaacagggaagggaaaacacacacacacaaataaaagctctcaacccccgccaccccacccccacccccacccccggcccacggtcagaggcagcatttgtggggcttttcagttcagacagcggcaggaggaggggctgagagcctgtctcctctgccttaaaatctcccttcccacagacaggaccccaggagaaccctccggctgggttctgcgtaggtaccacccccgcctcccatctccgagtgaagcaccaacttctccacccacactctcagatgggggttgggaacacagaactatgaatgcgccccctctcagccagggggaaacggggccaggcagcctccacatccagcatgaatggcagacgctgggggccaggactcctggggctagcttccaactccctcggtgggtgtctgcgctgccagcgccccctgccccccacccccaggccccgagaacaatcaagccgtccccagcccagggcttccatgcagtaaattcgtgtttgcagagctctgggaaatctttaggaggtggcatgagtattattaattggggaaaaagaacagattatgccaaataaatccttcccacataaccaaaccctctccgagagggggagggggagagcgcagccccaggaggggtctccatccctcaccagggcctgacagccacattaccatttacatggatttatcaatagtattgatccccagcagcgtaaatagctcagtgggaagaggccagggctggggcctgctgcgctcccgcccccatgtctgggcaccggcaccacagactcccccggcacccgctggcggtggcagcagtgaatttccaagcagggacacggcaggcggctcagggaagccagacagagcccgggatgccctggcagccgcgctgccgactcgccagtcaccgctggctccacccccccttcattgctctgctgggcctgactcagtctttgcatctgttcaatgggcgggggcacctgcccttctccatcctctccggacaagcagaggggagtgggaaaaggccccctccctcccccagatccccccactgtccacccccagccaaaggtaaggtggccccttttcacagggcttccagaccacgttggattaaaggcccaatcttagaacccaggaataataataccgacacagtagtcatagtaacacatacaagtaccaagggattcttatggccggacggtcagctctcacaaccactctgtgaactcagtaccattttgaccctcattttgcagatgggaaacctgacaggcacagagaagttaagcatctgtccagggtcacactgccaggaaagtggcaaaggtcagagtcaaaccccaggagctgaggtgcagagtgggccatcccacctcactgctgcttgccatttctcggcccctcctcagcacccccaaagaggccacccacgaggtacacagcctgccccgggtcgccctcccggcgcagtctggcccggagagccccttatatcaaagctgccgcaaggacccagatctggctgaaaaggggcaaagtcaaggccaccggtaacacatcccaacgcgcccagaactcccccaccccgcccacagggtcctccccttatcccctcctcccctcttccctccctcacacatccttcctccaaatctgcaaaaagggaaaaataataataatcacaataaaaccagttctcaccaacgggggagaggaggagggggaggaagggaggaggctgagccgacagaacagatccgcccccgctgcctgcaccagaccctcggagagccggagcgcgcgacaggcggcgggaggacactcgcttccaaaaaaataaacctacaatgtaaaaataacgccgggcgccccacgctaattgggcccgggcgacagcagctcccaggtacagcctgtctctccctcccgcccgccgtgccctcccgccctcggcttgctcctcctgcaagtgtctggggcggggagggcgtaccccacgggtgccctcactccccgcaggcctctgaggaagctgccctctagacaagggtctgggtcttcccagtcgtgcccaagtgggatcagctctgaattccaacttcgcaaagtagtggcatcccaagtatccgcacagcccgggggagggactaggaggcggcccaatgaggcgtcaccagccacgggaggcaggcccagacaccaggaacaccggcccgcgggggagggggaccaggggcgactctcccgagggaccccgcccagcgccccgtggccccacgcctaggagggacaaggctggctctccccctcggctggtgagagaccctcatgcgcccctccacaacagccaggccagggagctaggggtaccatctccaagggctttcaaacccgcgctgcccgatggaaaataaggcgcagtgtcgccccgccaggtccggggctacaccgggtacaagggacgcctggcggccaagtccccagagccggcgcacactgtggggggccgctctgtgcatttccagcgcgccccccgcccaccccaacgccacttccctccttcccgccccctcgctagggagctggagttcccctaagttccccggcgcccccgagcacgcgggccgcagtgtcggcggggcgccttgctccccagcaggccaccccccgagagcgccaactcgggagtgcaggggccccgccaactccgccgcgtgcgccgcccgatcctccccggatcccccggaagcgcgctccgcgcctccccccgcccttcgcggggaccctcggccccaactcacctcgcggaggtggcagcggtggcgcccgggcttggggcgcgctcgggccgccggggcgctcaggcaagtggcggtgccgatcgggctgggggcgcgcagcaggcccggcctcgggtcgggacgcgatcctcccgccgccgcctcctagggcgccggccctgggtccccggcccgcaagttggcgcgcatcgcggagcgcagggcgcgggcgcagggctcgggcggggcgccggcggacgcggggctccggtgcggcccggcctgcccgcggctccgcgctccccggcggccgcggcggcggtggcggcggcggcggcggcggcggcggcgggagggggaggagggggcggggcgcgagcccgggaggcggtggctcggcctccctgctcccggctccccgcccgcagcgacgcgccccggcccggccccctctggctccttaaagggcccgcgccttctctccaggccctgcgcgtccccactcgcgcgcgcacgccgccacacacacagacacgcacgcacacacttgggcgcgacgccgagtttctttttggcagctccccgaggaggaaggaggggggaagcgcctcccagccttcccctccctcttctcctgcgggcccgggggccctcctcctcctctccagccccagtacctcactggaatcgcgtttcagctattaaattataactctggagtggccgctggatggggagggggcgcgcagggagggccctacacagggccttttaggagcacgcccagtggggcacttggggacgggagcagacagtagcgcagagccctctccaggcaggaacacgctgggcctccccagacccgagacccagcccgggcgaacacactgcagactcaccacccaccacggaccggagatgtcagatctcacacagacaaatactgggacacccacgcgagttcacagcaccccggaggacacagacgctagaatgccagtttcctgagggcagagatttctattttgttcactgccctatcgcagtagggactcacgaatgtgttgagtgaagtcccacttggggacattcagggacacaaatgcggagacaatgcaacgagcctgtgtcccccccgccccccccacacacacacacagacacacacatcccaaagcgtgaccctgggagccacacacgcccggcctgcacaagcacgcagtcacagacggcacacatgtgctcgctcccccacgcacaggcagacactctccgctccagcaggaacctggcccccctggccgccctgacaacccagtgtcctcatttaccccctcctcccaccccctccaggtttgccctctccaaccagggcagatctctttgaacagcagagggcactgggagccctgggcctggagcctccctccctccctcctcttctgctttctcctaagatgttggagagtttgaattttttttttttttttcagttcaactttccttttttggagtgacgtctcagcagattcagttctgccatctggcaacatctgagaacccccagggagagcggggaatggctgcggtggggaggcagccgcgtggtttccagaggccggcgggcctcccgcctccgccaggatgctgggtttgccgggctcccctgcagccaggt

SEQ ID NO: 392 - DNA, 52974 bp, Homo sapiens
  source 1..52974: mol_type = genomic DNA
ctttacaggaatcctgaggtcagcatcatcccaatttcacagagtatgacatgacgtctcagagagggtaagcagcttgccaaacattccacagccaggaagctgtaggaccagcctgtgctcctaaggactggctcctggctgctatatatagaactaagcctggtggaggtgtcagaaatagaggttcacttctgtcatcaccgacctccctccacacctttgcaaaggaggaaactgagaggcagggatttccgcagagcaaggaacccaaattgctgcctcctgtgatttatacactgcaccccaagctgtaggggtaacccaaggacaaagctgtaacccaagcgggaacatatgccccatctggggccaccaaaatcttaccagcttcctcagctggtggatcggttaattcacggccacagccccctggagctgggggaaaggaaaaccagggcgtctccgcaaaccagcccagagagaggtctgcggaagggcccggaagcctgcaggcccctctgcacccccaaccccaccgccatcctggacctccaagatgacctggtccaacagagtcctgcatggaaaagactggaacccagggaggagcagagccccgcccaaggtcaccggccgagcctgaatagaacccggttctccaggagccctgtctttagctgtcttgtccaaataaaatttttcaggccatcagatttccgtactccctggagtgggacttcatctgggaccaaaggagggctggtgaggggagtggcaggagggaggagtgcctcggggccccgagcaggatgagcctgaggaagagacgggtccccatgttccctttcccgctcagataatggaggtgaattgaggggagcagagacctccccaccttcagggtgggaccctgagggaccaggacacctttgctaggggatgtccctcctcactcctgcacaagttcctcaaggacaccctcgggctccgaaaacggggggagggggacgacgccccagaggcccctgagcccctggttcttcccgaccctaagggcttttctccctcggttcccaggcggcgacggcgggtagcgcgaagcagcaggcgcaggggcgctgggatggggatgtctctgcaggtctaaggttccccttgggagtctaaacaaagactacggcagcgccgtcccctcccccgggaacccgacgccgcgcggccacagggggcctggaggggcgggcagggcctcgcagcgcacccagcacagtccgcgcggcggagcgggtgagaagtcggcgggggcgcggatcgaccggggtgtcccccaggctccgcgtcgcggtccccgctcgccctcccgcccgcccaccgggcaccccagccgcgcagaaggcggaagccacgcgcgagggaccgcggtccgtccgggactagccccaggcccggcaccgccccgcgggccgagcgcccacacccgccaaacccacgcgggcacgcccccgcggcgcaccgcccccagcccggcctccgcccctgcagccgcgggcacgcggaggggctcctggctgcccgcacctgcacccgcgcgtcggcggcgccgaagccccgctccccgcctgcgcgtctgtctcgtccgcatctccgcggtgagtcggcggcgccctcgcccctgagcccagggccagcttctctcgccgccgcggctgctgcgcgcgtccccgcccagcccagcccagccccgagcacgaccccagccccacgcacgaccctagccccgcgagtcccgcaccgactcgctcccgccccatttcgcctccgcgggggcggcgccccctcctccccgcggctcccgctctccttcctcgccttcccggccgcgctggggacccccagccgccgtccgcgaccccccaccgcgacgcccggaggcggcggggtctctttgttcgggcggcgggcacgggggaccacctcccacggtgtcaccgcacccaccccgcgcccttcctccgcctcctggagttcaccgggaccaggtggcggcgggtgcctttttgggggtgcgcggccatgcaattggtggatttttttaaaccgttttggaggggggagcgcggcgttgggggcgggagagcgctcctggctgtgagctgctcctgccgcttcgctccgcgctctcctgccgctccgctccgggtctcccgcgctcctctccccggctcggccgagcgcgctgccccgacgccgccacccagagccgggccgcgccgggcgccgagatgaaggtgctgggacaccggctggagctgctcacaggtaccgcccgcctgccccgcagccggccgccactttccgagttggagcggactccgggcgcggcggccggggactggggcggctcgggtctgagcaggaaggggtgcggaccccaactaagtcctagttttgtgctacctgtttgtgtgcggagcccagccccgggagaggacttgaggttgtggcgagtccctggcgctggcgtccgggctgcgggagcaccggtcagggggtggccccatggggtctctgaccagcggagctcggattaggaccctgaaagctagctcagggctcctgccctccaatcagtgtcgcttgtcccctaagaaaggacccgtgggcttctggcaggacccgcgccatggacctcttatttctgcgccctgtgacaatctgagccgtctttctctgggggagaagtttcttgctgggagtggaggcgacgccaagtggcctgggaagtgggaagccagattggaccctactgactggggaccctcagccttggggctcctctggagaagtgatcagttgccctgctggaaactcacatccagggggcagtggctggagagcaagagcgaacggtcaggaagaggaggtgggaaagggagcagggacgggggggaggattcgaggagtgacttctgtgttctccccggtgtggagagacccagacaggaggaaaggaaagcaacccggtttcctccagctctgggacttataggtgctccatccgtgtatgtcagatgagcacagattccagtaagtgtcctccgacacctgggggagggggctgatcactgccttccaggaccttaatgtccgatgagggagcagagccccggagccctgttacaaggctggaaggggcagccgtctgtgggtgcgctcaggaaacggtggaatccgagtcgggggcagcttttgaagacctcgaaaaacaatttttgttaatgaagaaggaggtggcattatgggttcaggatcaagggaatggcccatgctctggggtgtgagagaggcttgttcggggagaggtatggaggctgaatggcctggaatgtgcgtgtgtgttgcgggggagggggctagaaggtgggggtggggtacgttgggtgaggttttattaaatcggcagtagcaggccaggcgcagtggctcatgcctgtaatcccagcactttgtgaggctgaggccagaggatcgcttaaggccaggagttcaagaccagcctgggtaacatagcgagaccccatctttacaaaaaaataaataaataaatcagcaatagctcgtgacagacttgtagagaaggaaaggtggaagctgttcctgggacactggaaactgactgggtgctcagaagttccagcgctgagcccagttagccacggggctggcaccccctccaatcccttgccaactttttctttgtggagctcacttgaggcaggcccagctcacccaacttggaagggaaccgcgcaggccactgaacttgttaaccccctggagggaaggcttgcggttccatgggtgttttgtttgtttgttttgttttgagatggagtcccactctgtcgcccaggctggagtgcagtggcacagtctcggctccctgcagcgtccgtctcccaggatcaagggattctcgtgcctcagcttctcaagtagctgggattacaggcacgcgccaccatgcatgcctaatttttgtattcttagtagagatgggtttcgccatgttggccaggctggtctcgaacttctgacctcaagtgatccacctgcccctgcctcctaaagtgctgggattacaggcgtgagccaccgcacccagcccccaccatgggtttttagagctctgcatggtgaacagatctcctggttcctctcttccccaactcttcctgcccccaaagggcctggatgagaaatgctcacaggagacatgtgtggggggctcaagcaggggtctaggctttggagaccccatgcactgttctctcatctcctggatagaggagtcaggacccctcttcccccaccagatggggtcaccagattctggcgggctttctaagtccctggccagggtggatgaggcccctctcagttactgtcatcagtcacaggctccgcccccattgtacctgcaacctggccctgggagacaacccatcccctctgttgctattttgtggtcttcacagacttccctctctgtcctcttccttttctcacagatcgggattctaactccaaccccatcagtagccagctgtgtgacttcagacaggttgcttaacctctcagacttcagccctctcatcttaaagatggaactgttggcccctgtctctaagagatggtgtaaggcttgctgagatagtgtaggcgacacacgtggttgggacctagaccctggtgggcacctcttgggccccacctgtcctggctggttggcacctagagcatttggatctgcccccaccctcctttatccctgctttcctgcgtctgtgagatttgacccatctcccccattggataacaagcaggtcacagtccgggaggtggccactttattgtggtggcacacagcaaatgctcaagggttgctgactgaggctaggctcacacagcccactcggcatctacgtctctaggataattctgtagaggcctctaactccctgccccgacatcagccttaggaaatttttactgaattttaaaaactcatattgaaggctgggcacagtggctcacacctgtaattccagcactttgggaggccaaggcaggcagatcactgaggtcaggagttcaagaccagcctggccaacgtggtgaaacccccatctctactaaaaatacaaaatcagctgggtgtggtggcgcacgcctgtagtcccagctacttgggaggctaaggcaggagaatcacttggacctgggagagggaggttgcagtgggccaagattgcaccactgcagtccagcctacgcaacagagcaagactctgtctcaaaaaaaaaaaattgatttagttctgtatacttttcacattctcctattttattatcttgcctgtcttgccagtgaagtcagtgacttcctcatgttcctatttctcagaagaggcagcactggattcagaacccagccctgagccgggagttgtcccatatggcattctaactgcctggctttgggacagtctaatagccgttccacacttcattttcctcatctgtaaaatgggatcgtcgtggtgcctacctggctgggatctttggagattaggtgtgtgagcgtgtgcaagacgtcgagtgcagcttctggcgggcggatagttgatgacagtcgtggagctggcgtcctcaggccgcctcccgagtgcactccatcactgtgctgggggctccttctcctcccactgtgctccagtttccagattccctccccgcagggtgttccagttccttcgttgggttctcacaacagtccaggcctctctgagctgtgtctctgggggaccctacttaggtctcaggttcctgtgagtcaggcatggcctcagggggtggggcccttccagccagacacccacagctctgacatcatggggaaggccaggtgccccctcacatgtgggactagaaggagacccatgggttgtcatgcccagatccagcatgtctttttgttctggagagaagaggaggctgttggggtccttctggaggctttgtaaatcatgaatgcttgtcgaggccatttccaggcgcctcagcggggtcttgctgcaacagggacaaggaaggcgggggttttggaatcagaggatgtgaatttcggggtctcccctgtgcttctcagctcctgggcaaattgttaccttctttcggcctcagtcttatcagtaaaatgggaataatagccctcattaacagtgttaggccagagcagttgtctcacgcctgtaatcccagtactttgggaggcccagatgggtggatcacctgaggtcaggagttctagaccagcctggtcaacatggcgaaaccccgtctctaccaaaaatacaaaaatgaaccgggcttggtggtgtgtgcctgtagtcccagctactggggaggctgaggcaggagaattgcttgaacctgagattaggaggttgcagtgagctgagattgcaccactgccctccagcctgggcaacagagcgagtctcaaaaatatatatattgtggggagccaagatgatacttgtgagggagcccaagacaccgtcacacctgcacacgagctcattacaattctcagagggcagattcctggtgccttcggtagccggatgatttttttattttttagtgtgatatgtgaaagtgggacactggtctttttgcaagtaggaaggcagttgtttctgcgcattggcactcgagcaatatgttccaaaacggttcagagtcagagctctaaaatggcagatttgggctctgaaatggtccctggggagcctcagtagtggatcttggaaatttttaaaaatatacttgatgtgtgattgagaaacaaaagttttaccagttgtttagaattttggtttcatttgaatacatggaatatctagccccagtcaattttatagatgattttagtgtttgttggcagatgtgttgacccacattttacatacggaggaaactgaggcataggtttgccctaggaggctgaaagcaggaccctggatcctcatttccagttcatctgcttctccgcttcactggggtgctgtgatgttgatgtgggggcacgtacatggtttagtaaggaagcgtggtcccttggaggagaggagagacatgagggtcattgggtgtgctcagggagggtgggtgtggggagaggggcgtgctgttcctctgggtagaggattataaagggcaagttggcaatgatgtatcaatagcttaaaaatatgtgtgatctctgactcagcagttgaatttttaggaacaaataaagatgtgtgcaaaggtgtttgttcaaggatagttatcccttcattgtttatagaagcaaaaaagcaaaaaaaacccaaaaaactggaaacaacctaaatgcgtaacagtagagcagcagtgcattcataccagagaaccccaggtagctacgaattatactgccaaaggttatttatccatctgaacagatatccccttaaatagtgtaatactaatggtgatgacagctcacacgtatatggcatttgctgtgcgccagacatagtcttaaccacatgctatatgttaactcatcatcataacagccctaggaggtatgtgctatcatttcttcttttttacaaataggtaaactgaggcacagataggttaagtaacttgccaaagagcacacagatggtgagtggctggctggaatttaaaccagaatgtcttgactccagagtccaacagatgtttcaaaacatattttttgttggtttgtgttagaaacattttctttcagtgtctagatgagcattggaaaatgaataaaagggtatacacaacacattaacagtggcttcttctgttaacaggattgcatgtggtttttactttcttctttttggtcttctgtttttctcacttttctcagtgaatgtgtcttataagaaattcaaattctgtttttaaaaacaaaaaaattctcttctgaaggctaattttttaaaaaaactaaaaattaatgcaaagcactagatgctgacaaaaaccaatcctgtgggaattctgaagatgagctggagtccagtggacagagaggaaaaggccaggaggaggagtggttcaaggtggatgtgaagttggctttccttgaagtctaaggaggaggaaccagcaaagtgaaaaatagaggcaaaggtggagccatgggaaccttggaaggaggctgtgttgggctgaataatagcccccaaagatatcctaatcactagaacctgtaaatgttacctgatgtggcaaaagagattttgtagtcatgattggggatcttgagttggagctgttttgcagaattatccagtgggctgtaagtgcaaccacatgtgtttttataagagggaagcagggctgggtgcggtggctcacacctgtaatcccagcactttgggaggctgatgcaggtggatcacctgaggtcaggagttcaagactggcctggccaacatggcaaaaccccatctctgctaaaaatacaaaaattagccaggcatgttggtgcgtgcctgtaatcccagctatgaagggggctgaggcaggaggatcgcttgaacctgggaggcagaggttgcagtgagctgagattgtgccactgcattctagcctgagcaacagagcaagacaccatctccaaaaaaaaaaaaaaaaaaaagagggaagcaggggatattcaaaaacagaagaacaggtgatatgattgcttcagcaagaagctctgttgttggacttggaaggtggaggaaggggctaccagccaaggaatgcagctctggaagctggaaaaggcaggggaacagattcttcccagaacccccagagggagacagcttaccaacatgttaatttcagcccagagaaattgattttgaacatctgacctccagaactataagagaatgaatgtgtgttgcttttttttttttttttttttttttttggagacagggtcgtactctgttgtccaggctggagggcagtgtggcatgacctcggcgtgaatgtgtgctgctttaagccaccaattttgtggtgatttattatagcagccacaggaaaccagcaggggtgtgtgcagatcacactcaggcctcggcctgcactgagaacagcacggtgggttggagtctgccagcctcgttctgatcactctggctgtgtgaccttgaactgagcctggctttgcccccagggtagttgcgggatcagctgggagagcaccatgacactgttatataaactgaagagcatcacacaaacctaagtgggatgagcacttccacccagcctagcataaacctggtctcacagagccaggaaagctgtcatcatacaccaccccctccctgcctcttaatcctcagtgctttagcttccaaaccacaggtggaatgtatcgccagccagagtgatcaggtgtcttaagccccataacaaataaccctggggacctagatgctgcttcagttcacctgttggcgggggtggtcgggcaggtgctgtgtgcctgctgataggtcccaccctaggcagtgagctggggaaggtgggaccccagcctctttggaggggacagagggaatatttctgggatgtcttctccccagagtgtgtgagtgtgtgtgtgtgagagagagcagggagtggaagagtcccataaccaagtccagggtttgcagtccctaggatcataccctgtgcaccccaaattgtttcctgacagctctaggggtgccagaaatggcttttaacaatattggccacttggtgttctggaggataaatgtgctgttggggcctgggctctgggatagggagagggaagccagcaggctcccctttaagtttttggaagagctcccgcaccagcctttgcctcatccataaaggaagtgcactcagcctactgctcccaaagcccttaccagctgcagagtattcactctgtgcttggcctatgtggacggagcagaggagcagttgtcagagatgacccagaggtcccttgcaacccacaacctaaggtgagcacccaggaggatgaccagggtggcctgggggtgcttttccccatcacagcttagggtccatctctgaaagtgcctgggttgggaaaggccgaattaccctggagtagagcatggtgttgccattcgagtgtggtgggaaaggcctgctgtcaagcacgtagggccctctgaccccgcactggggcccggctgcctgtgtgtgattgccaaagggagaggcgggatgctggcttcacccgaccccctgggaccatgcaggagagaataacttagaagttacgttaggtctcttgggtgcaagtgacagaaaccgaactcagactgatacaaagagaggaagatggggtgtccctggccagcacagtggacacagggccatcggcctctgtctctctctccctcattcctactagtttggttctctggattggttgagctctaagtcaggcccttcctcgcaagggcagtgtggttgctggctcacagaccgtcctcctgaaaaccccattgctggggaagagcttcccctctccaaggattccagtaaaggccttcgagaccgggcccagggctcggtccacttggtttccaggccacccaacccctctgtctcctgcctcagtggcttctcattggctttgctgctttatcctcattgtcttcttctggggctcagtgctgggacatcttcttccctgtcctcattcactccctagatgacctcatctagtctctctatgatgatatctttgaagtgactcctcccaaggttctgaagtacaaattgttttctaaaaactgtattatgtattatccttccctctgttccttctcctccttcctccctttctcttcccttcatttctttctttagaaagacagggtcttactttgttgcccaggctggagtacagttgcctgatcacagctcactgcagccttgacctcctgggctcaagcgatcctcacgcctcagcccccgcccctaagtagctgagaacacaggcatatatcaccacacccagctgacttttaaatttttgtggagacagggtctcactatgttgcccaggctggtcttaaactcctgggctcaagtaatcctcccaccttggcctcccaaagtgctgggattacaggcctgagccaccgtgctaacctgaagcacaaactcttacatccacctgcccacggggagctccacctggctcaggtctaaaaccacacccctcatctttcccccaaaccttttctcaaggtcttccctaaatcataaatgatagctctatccttccatagctccaccaagtcaccctaacttctctcttcctctcctgcccatgtctgatggatccgtgagtccccctagctttaccttcagaacatacccagaagctgaggacttcagccacctcctgcactcccgctgtgtggcaagccagcagcacctcaataactggtctccccatttccaccctaacccccagctctgttctgcacattgcagaaggagggatccttcatgatgaaaactgtatcacatcagccccctgctcaaaaccctccagtgcatgtttatactcagagtaaaagccagtttccctaacaaccttcagggctgaacgggaccagcactccaacgcttaccacccctgtcctcatctcctcccctcctggctcactctgctccagccaccctggttttttcacttttcttttctttcccttttttttttttttttttttttttttgagagagaatctctctctgttacccaggctggagtccagtggcgtaatctcagctcactgcaacctctgcctcccaggttcaagtgattctcctgcctcagcctcccaagtagctgggattacaggtgtgcaccacacaccacacacccggctaacttttgtatttttagtagagacggggtttcaccatgttggccaggctggtctcgaactcctggcctcaagccgtgcacctgccttagcctcccaaagtgctgggattacaggcgtgagctggcttcctttcatttgcttgcctgaccggcttcctttcgtttgctcaaacatgcaggcgcctgcctcctggcctttgcgcttgctgttccccctgccctgagtgcccttcccggacatcccaacgctcgctcctggatctccttcaagtcttgcttgcctccccttctcagcaggtggcttctcactcttaccaccctgtttcacatccctctctctcccctcctgtgaagctgcttcctgcattgcttaggtcgtctgacactctgtgaatttacttaggtttgttgattttttgcctcccctccagcacccagaaagctcccgaaggtagatatgtttgtctgtaatggtcagtattttatctccagtcctagaacacagtaggtgccaaatcagtatctggtgaatgaataaatgacttaggcctgggccactcctggggtatggacattcgggcccaaaccacatgtactgagaatggggaagggaggtttcccaaaaggaaacccagtgctgttaggagaaaggaccttggtgtcaggtggggaccaatgcaggtagccccttctgcagacattgcatttgaggcaggaaagctctgggagttgcttggaacagagtccctctctgccagatgaatgtcattcctcaaatgctaataaattaggcatttcagagaagtaaggggctttccgtgacaaaaatgcccagtaagaaagatgcccctcgggctctctctttactggagactgtattgcagactcctgtgccagagaagtttcattgactcagtttacctgtttgaatcttgcacaaagatccaggatatgtgtatctgggaaatttgccagcttgggcaaagatacacagctgaattgagtgaggcacccgtgtaaaagaaatgcgagaattcgtgacaaaaagtgccagttgcttttaaccttttaatgtaggtcatggttacccatgtcagtataattattgtgagcttgtgaggtgtgggttaggaggggctggctcactggtttaaactgccagaagagaatggcatcatggattatgctgcctgctggagagaggaagttgcaggtttgctctagcatttccctgtttttctctgggaaagccccaccctttcctttttccttgatttcctttagcacgatagggtgggtctccaagaaaaatatcccaagtttagattagcttcagctgtgtgtaacagaaaacccatggtaataataagtaagataaaagtatttttttctctctcataaccaggatctcaaaatagaggattcccaaatcatggcttcatgattctcaggtaccttgactctttatttctatatcactactatgccacctttagaatcctgcctttgagcctaaaatggctgttcaagctcctgccatcacatctgtattccagccaggaggcaggaggaagagtcaaagaatggcatgtctccccttttttttttcagacagagtctcactctgttgcccaggctggagtgcagtggcacaatcttggcacactgcaacttctgcctcccaggttcaagtgattctcctgcctcagcctcccaaatagctggggttacaggtgctggccaccacacctgggtaatttttgtatttttaacagagatggggttttgccatgttggccaggctggtcttgaactcctgacctcaagtgatccacctgcctcggcctccccaagtgctgggattacaggcatgagccactgcgcccagccatgtctccccttttaagaacactgcctgaaagtaacatgcttccatttacctcgcactggcagaacatcacgtcatcataaacaaattttattcccatcatccacctactcatctaaaatatggggattattattaaggaagaaggggagaacagatatggggggataattagcagtctctgctgcagtaggactctttcactggttccctatagaagctgcctaaatggaatgtgttattggaattctagttccatctggccttgcccttggtcttagaattagaggcctgttgtgtctattgtaatgtccgtgcttaacacctggagccatgttgtgtagagaagcagagtttacacgttggtgctgtacatcaccttcttactttatgaaagcgctgtgttatgtcctttctaagatgcaccttttttttcatactttaacatctctaagattgggatgcatcatacagtctctgttggcaaggggggcctcatgctgttactgccatcacatgaacatcagaatttgcgagtggatgtcagcagctcagaaggaaatcccagagatagtagtagagcatccttgatgctggagaagcccaggctgtgtggaatagcacagcattaaaaactccatgatagagagattaagagacattggactcgaaatgtgaaaaggaataccttaaacaatttatttcaattatattttcctttttaaaaatttacaaaagtgatagatgcttttttaaaatctggatctaatatattctaaaagagttctttcagtaagtacaaaaaaacccctgaatgacaggaactcatcataagggtagcagttctgacactactttatatgtatcccaggaatgaacaaataagcaaaaatattatggatgagagccaggtttctcaccactggagaaaaacaattgcaatcaaacgggggaagctagaatgcactctgtggtgttgaattagagttaaagggatcagtataaattccagattccatatatatgatatatatgtgatatatatatgtgtgatatatatatatgtgatatatatatatatatgtatgtgtgtgtgttagtgtcttgcatacatttcatagctctgcctgctaagagggcctagaccaatgacaccccagtagcaatgagcacacctggtgtccagatcttgatttctaaacgtcattctccaataaagggaactaggtctccttggagaaatggttgatttcatggttgaggcagagaaagtacaagatgagtttagaacatgtaatgaggctagaatatttgaaactcaaaaaataatgggtacatgttgaaagcacaaaagagccaccttaagggaactcccaatggccaagcctggcccagtttgaacaatgaaacaaataatgatagcaatggcttttaacccacagggtaaaataaatatccatgagtccttattgatataaataagtaattgaataaaggaggaaaaaggacaactctttcttacaggataattccaataagtgtagaagagattatggaaatagaaaattatcttcttttcctcagcaggaaaaaaaaaaagaaaattatcattaggcaaccaccaaagtaataattgctgtaggcaagaatcaatagttgttaaaattagcaggggtaaggggggtggagggggtggggaagtatgatgagacataggatgtttacatagtgtcaaagtatcttcccacactgcttacaaagggaaaaatagtaacatttcagtggagaaacctggcagagagctccttatcaagggatcaaggttaacgtcctctgtaataagacagattgacatcatgtgcctgctgatacaaactgagaagggcacctccttctgtcgtattcttgccaaaaatgtataacctcagtctaatcatgagaaaacaacagacaaacccaaagcgaggacattctactgactaactggccagtactcttcaaaagtgtcaaggttggccgggtgtggtggctcacgcctgtaatcccagcactttgagaggccaaggtggatggatcacgaggtcaggggtttgagaccagcctggccaacacggtgaaaccctgtttctactaaaaattcaaaacttagccaggcatggtggcgggcacctgtaatcccagctacttgggaggctgaggcaggagaatcacttgaacgtgggaggcagaggttgcagtgagccgagatcgcgccattgcactccagcctgggcgacaatatgagactccatctaaaaaaaaaaaaaaagtgtcaaggttataaaagatgggctgataaactgtcccatttggagaaggccaaggaggacataccaactaaatacgatgtggcatcctgggttgggtcctagacccaaaaaaggcattattaggaaagctggtaaaatatatgtacgttctgtatattacttaacagtatgtatcagtgtttaatttcctggtttctctaattgtattatggttctgtagcatgataacattgggggaagctgagtgaagggtatgtgggaaatgtctgtgtttctgtgcttttttgttttttgttttttttttttgtaatttttttgtaagcctaaatatttttcaaaataagttaaaaggggggaaagtattatgtcttcatttaactggcagtggtttttttttcttattgatacataaaaattagtgtcacttgtaatcagtgatatcttagatttgataaaatctggtgtataggattaaaaaaagaatctcccttttatacccttctaaacccatatccttcctcagagagaagcattgttacagtttaccctgaatcatttgaggatttttttttggaagttgccaatatatgtacctgttcaatgcatataatttttacataaatgagattattattattattttgagacagaatctcactgtgttgcccaggctggagtgcaatggcgtgatctcggctcactgcaatcttcgcctcccaagttcaagcaactctcctgcctcggcctcccaaagtgctgggattacaggtgtaagccactgtgcccagccataaatggaattatttttacacattatttggtgacatgcctttttttcttaattgcatattttagaatgctttcccactctgtttgagtggagctgccttgtttatttaatggctgcatggtactccagggtgcagatgttccataatttatttcaccatcctcctggtgctcactgaggtggtttccagattgtactcctccactcggctgtgcagtgagcacccttgtgtactgcctcttagtgcacacatgggtgtttttctttaggataaatacctggacacagaattgcagaactgacagatatttgcatttaacagactaccaagttgttctccaaataaagttgaacccactgccatccagccagcagcatgagtgtgtgcccactttcccagaacctcaccaaccttgcacattatcagtcttttagtaagttgtggtctgtgtgaagaatgattcattcgttcatttacttacatgattgaacagaaatgttgagtgtctgccctgtgcccagcactgtcatagacacagggaacatccgagcgaacaaaacagatgtagttcttgtcccctaggagtgtctgaggagcaatggtctgagcaggtcatgttgctcattgtttcacgtgcatttctctgacggccagtgaggcagagcagatgcttttcctgtgttgtttcttctctgaattcctattccagaccttcgcccacttttccattgagtgcatagtattttctttctccttattgagccctagaatgggagtgctactaagtctgtcccctttaggggatttcggcaaacctggtggggagactggagacacaggtaggatttgagaggaaggagggagcccagaccaacctgtaggaggtggggaatgtgcagaggctgcatctgcccctccgattttttgtttgtttgtttgtttttgagacggagtcttgctctgtcacccaggctggagtacagtggcacgatctaggctcactgcaacctctgccttccaggttcaagcaattctcttgcctcagccttctgagtagctgggattacaggtgcctgccaccacgcccggctaatttttgaatttttagtagaaacagggtttcaccatgttggccaggctggtctcaaactcctgacctcaagtgatctgcctgccttggcctcccaaagtgctgggattacaggcgtgagccaccgcacccggccctgccccctccaagttttgtggccaaactcactgacctggaagcctcttgacagccagccctgtcaaacagccttgtaccagagtggcctcaccaccttggtggtgtgcatttgaatactgctttatgcctataactgacattggaacagtggcatttgagcaacaaaaatgtttatcctgtgctttcctatggcttctgtggacaggtcagccgtggagatttctggcctgtcctccatccattttaccagttattaagcctttgtgtgtttggactctgatagggttggacaaatgaacaagatcaggtcgctgtcctctgggagatgacagtagggagattaaaccactcatccatgcatcagtgggttagcaagatgatagagtcccagcctggccaacatggtgaaaccccattactactaaaagtacaaaaattagctgggcgtggtggcagaagcctgtaatcccagctatgttgggaggctgaggcacaagaattacttgaactcagaaggcggaggttgcaatgagctgagatcgtgccactgcattccagcctgggcgacagagtgagactctgtcttaaaaaaaaaaaaaaaaagatgatagagtccacacatgagcatatgagctccagacctggacatcatgggttcaaatccaggttccatcacttaccagtcgtaataccttgggctggttatgtcacctgtgtatgcctcacttcctcagctacaaaatgaggacaataatagtacctacctccatgaggagttaggaggactaaatgagcttatacatgtaaaatgcctggaacatagcattcattaatattaaggattgtttttcatattgctcccattgtagggatatgatggggaaaggcactctaggcagagggaacagcatgaagaaaggcatgtgcttcccatggggaggatgcgcctactgagtcagcccgggtctttagccaggagtgccagaatccaaatatggctgcctaagacagtgggaatgtgctgggggtgcgtgcgtgtgtgtgtgcgcgcgcatgcagggtggtggtgtggttggtgagggcatagggattcacaggctcaacccaaggaaaaagcagaactggtcaagttcaagtttgacataaatcaaggagccatacctagatatggagcctgggctggagaaataatgtcccttgcatcctcctgtcctgccacccacccggggaggcggaatgcatgtaggcgggtggaagcatgcactctgggtcccctcctgggttggccacaggaggacttgcaccagtcagttgctccttcctgtgcctcttatttctcatccgtgaactgggaatcctgagggaagattgagcccccatccctgccccaccctcagtgctgtcccaggcctaggagatcaggataaggacagggagagaaataagagggtccagttccctggacagttccagaccccctatatagtgcagttggaaggtgattccccaatttccggggtcccagatttctggggcttcttttccaaccaggcactggtgtagcgtcgggtagggtggtggcccatgtatcactgagcaccaactctgatccaagcagtagggatacaccaggcccacggcgcctgggtgcagaggcctggacatgagtcacatgctcccactcggccacatcattccttttccatgttacggacccctcccccagggtagagctggctaggcctgggtatggctcatttcatttgcctgtggcatttctcataataatgggaccttataactcaggagtgtggcatactcaaggcagtgtggaccggaccttgaccctgacctgtgggtccccttcacccctgtggttgaaggaacaccagccattccacagttctacctcttttcttgtttggcctcttcctgtcccgcaggcctgtttcctctgtctggcttctcctgagccctctaacttcactccatttaagtcttgccctcttctctttcagttctagcgtttctcactgtgcagctgtggggggtagagtggggagtgatccttcatgtgtagcactgtccccacatcgcatgacccttctcacccgtggtccctgggcactgaatgtaggacccccagtcactgagaccacccaaattctccgatgtattttcattttttttctcctcttctcttctctttttccttccttccttctctcttttctctctttccatccctcccttccttcctccctcccttccttcctccctccctcctttccttcctccctccctccctcccttccttcctccctcccttccttctttccttccttccttttttccttccttctctctctctctttctttctctctttctttcttttgacagagtcttgctatgtcacccagtggagtgcagctcactgcaacctccacctcccgggctcaagtaattctcctgcctcagcctcccaagtagttggattacaggcacccgccatcacgtgagctcagctaatttttgaatttttagtagagacagggtttcgccatgttggccaggctggtctcgaactcctggcttcaagtgatccacctgccttggcctcccaaagtgctgggattacaggtgtgagccaccgtgcccagccccccagtgtattttcaaacacccccaccatctcctaccactgctgaatttgttctcccgattcagcaattgcttttttctgtaggatgtataactactactgatcaatttaagcatttatgggatagttccaggaatgatcacagtcatggcttctatttttaaccctaataatcagagggttcgcctggccggggtctcagcatggaatcacagttacagaagcatagtgggaggggcctgctggctgcatggtgggagctgagtgctcctgtttgcctttaaaaaaaaaagaagaaggagaaaaggagaaaaaacacaaatcagcaaccagaagtaattaaactgaaatgcaattcctcttaaggaatccatgccactaacacagcgcaggagcccatttccacactccccggtgctcttttgcccttgaggggcctcttacatgtctctgtcccccagccaaaggggctgtttcctctccctcatcccctgtaccatccctcccctatgtacatcagcttagcccctctgcgtgcagctatgaatctatcctctaacagaaacaagaggaaaaacacaaaaaactccaaagttatcttaaatcggcagggaaaggcaaggaacacactgatcacctatgtgatttttgttccattcaaatatgtacaaaaatctttcatttaaaaggcattttaggctgggcatggtggcttacgccagtaatcccagtgctttgggaggctgaggtaggaggattgcttgagcccaggagtttgcgaccagcctggccaacatagtaagaccccatctctacaaaaaatgaaaagaaaaaatagtcgggctctggtggcacacacctgtggtcccagctacttgggaggctgaggtgggaggatcacttgagtccaggagttcgaggctgctgtgagccatgattgtgccactgcactccagcctagagtttgcttagagcagagccagggtttgttttgaccaagaccctgtctctgaacaaacaaaaaaggtcatttttacactttgggaggctaaggcaggtggatcacctgaggtcaagagttcaagaccaacctgaccaacatggtaaaacctcatttctactaaaaatacaaaaaaaattagccaggcgtggtggcaggtgcctgtaatcccaactacttgggaggatgaagcaggagaatcacttgaacccaggaggcagaggctgcagtgagctgagatcgcgccactgcactccagcctgggcgacagagtaagaatccgtctaaaaaaaaatttatatatttattgtttctattgtacctcagacttctctgaggtgggcaacatgctctcatattgcaaataagtgaggctttgagtgatttgctcaaaataaagcaagctgttgaatgatagaggagaaatgccagcctggttgcagtggctccaggccttacccctgagaagtagaagcatttggatttatcccaggcccatttggtgtgtacagcttctgtctgcccaggcccaggtccctgcacacgcgtctcctgggagagctcttgtctgcaccaggagctgggcagggcggctcctgtccctttagggaataagagatcaagaagtggaaaagcatgatggaagggaaagagccattgctggccacttcatagaccctggcgttcgcccacctctgtgctacttaactccttggagaccttagccaggcttcattagtaggactctcattttcttataacttatcacacagcttcttaaaaaaaatcataacttactttttttttttttttttttgatggagtctcgctttgtccccaggctggagtacagtggcgcaatctcggctcactgcaagctctgcctcccaggttcacgccattctcctgcctcagcctcccgagtagctgggactacaggcacccaccaccatgcccagctaatttttttgtatttttagtagagacggggtttcaccaggttagccagactggtctcttaactcctgacctcgtgatccacctgccttggcctcccaaagtgctgagattacaggcatgagccaccacgcccggcccataactttctttagaagaaacttctctgccaccgtgctgtggaaatgtctgctctggcgtctttcttgtggagccccacaactccagccaagccctggactgtctgtttttcatgggctgagacattcccggttctctggatgatgaggtctctctctgcccccttccccgccaccacctccgtcacaggccatctgtccctgcactgcccactctcagcccttttaatagcatgggccttggggaggatggtgtccagggtggtttcataacaggccgggggaggggggctacagggataccccagggctactaaggggtttaattgagatgggtgttcaggaaggcaggtggctaaaatgtcctgatgcggaagagttttccaaggaggggacccctctttcagctctcccagcccccacaccctggatggatgggtgagtgtgcacacatctgaaaggatggaaatgggagcgggagagccttgaggatgcctttctaaaaatacagcccatctgcattgtgttagctggtttcctcggaaaccactgggagccgggactccagcatggcacgtgcacagggacccaggcctgctttttcatttattgtaacaggaattttcccattatattaaataatattttattattgacacacagtttatcttgtaccctattgatggacattttcttccaatttttttctgtgttataaatggcactgtggtaagaattcttatagataaattatttgttgccatctctggtttccttaggcaatttctccacgggagaggattgctgagtctgagagtatgaaccttttaaatagttttaattcatttgtaaaactgccctccagaaagatatgtccatttatatacttacaagccatataagaaggtgcctgtttcagtgcaccttcgctagcggtgtaaactttgccaatgccattggcaaaaaaagaaagagctatccattcattcattcatttgagacacggtcttgctctgtcactcaggctggagtgcagtggtgcaatcatagctccctgtagccttgaactcctggtctcaagtgatcctcccacctcagcctcctgagtagctgggaccacaggctctcaccaccacacccagctactttatttttttcgtagagatggggccttgctatgttgtccaggttggtcctgaacctctgggctcaagcactcctccggcctcagcctctcaaaatgctgggattataggcatgagccactgtgcctggccaaaaaaaaaaaaagtatcttaatttaaatttctttgacttctagtgagcttgaatatttttccatgtatgtactggccaatttaaattcttttatgaatttctagattatgtccttggctagtttttctcttggtgcattctgacctctgccatcctgaagttgagggatggtggtgccattcctagaggaattgtggggtcctgggaccctctgtcttccttccctcaccactggctcctacacacacacacacacacacacacacacacacacacacacacacacacacgcctgcatgtatgacccattcttcctctgaggttcagaaacccctggggtttcccagcaattagggcccgggcccaccctctggcagctgagcagcccctgtgtatcacccctccctgttggtggcctgaactgagacctgcaccccctctttcaacatcactcggcctgccacaccaccagggcctctactcccacccacccctccctggcccatcttcacagaggcttgtcctgggagccctctggggagctctcagctctgttcctctccagtctctctatcctccagaaccccactgtccccttcagacaccagaggccctcggcaggggacttctgtctgcgtctgaccctgtgtttggcctccctgcacgtgcccttctgtttctcaataaaggcagaatgttgcatgtaattgttttaggaatcatgacgttgcttttctgttttatttggaaacgttttaatttttaagagcaaataataggctgggcatggtggctcacacctgaaatctcaacactttgggagaccaagacgggtggatcacttgaggtcaggagtttgagaccaggctgaccaccatggtgaaaccccgtctttactaaaaaacacaaaaattagcaaggtggtggtgtgcacctgtaatcccagctacttgggaggctgaggaaggagaatcacttgaactcaggaggcgaaggttgcagcgagccaagattacgccactgcactccagcctgggtgacagagtgagactccgtgtaaaaaaaaaaaaaagaaaaacggaaaaacaaatactataatggtatcccccaagccagacaggcgggtcttgcagacggaggcctgggggccctaagtgcctgagtgggctgcgcttgggggccagggggacagtgcatctggtttccgcgctcccgccccagccccgacttgcgctgtccttctccgcccgggcgtccccgccgcagcaggcctcaacctcgccctccctccctaggcctcctgctccacgacgtgaccatggccgggctgcaggagctgcgattccctgaggagaagccgctgctccggggccaggacgccaccgagctggtgagttggagtcgcgcctttgaggtcttagggccgagcgcgccacctcgtggccaagagggagaccgcgtgcctttcctgcagccgaccctccctagggccagccacaccgagaagccctgtccctgcctgtggggggagttccggcaggcctgagtgccacccagacccagccagcctcacggtggcttcagccgtctttgaggctaaaggcgccacaggagagttatcccggctttaatgacgagaaaaccgaggcacagagaggtgaacccagttggccaaggtcacacagctagtggggaatgaggccatatcaacccctgtttctggacagcccaggagccccaagtgctggctccagcagggcatgctgctcctccgtctgtgcgctcttttccttatctgcctcccaagcctctgcggcacctgggcaagtctaaccaacagtgccacccggggcagtgggacagaggcatcacaggttatgattttgtcccaaagacccctccgtcaagggacaaggcattagaggccagagtgactttcatgccacccttttttgttgtgacaacaccctgtccaccttccctttccctccctcccagtgccgtcatactggtgactgtgacacaaaccactttcaaaaagtgtgggttccctgcttgttggattctgaggcatcagggctggggtccctgcaagttatgctgcccggacccccttcttttacagatggggaggccaggagcccagcccctcaaatctgcagggcactgtagtctgccctgccctgcctccccagcctcccatcaccaggaggggagcccaggagctactgagcagccaggattggaactgtgcagccagccagggatccagggatccaaccacatgaggttgcagtcctgcccccaggaagagtacagtgttatcttccagacagaaccttgagttaactgataaggcctggcttatccgagggcagccacggataagctgccctggtggggtggtgactgcacatttttcaagccctttattctaagtttacttgctccctggtctgagcctccatcagctgctaccccaggatgcttgcagaagcctccttgctggtctttttgcttctgccttcgctctgtacccttttaaaataagccatgagctgggcatggtggctcacacctataatcccagcactttgggaggccgaggtgggcagatcacctgaggtcagcagtttgagaccagcctggccaacatggtgaaaccctgtctctactaaaaatacaaaaattagcccgggcgtggtagtgggcgcctgtaatcccagctactcaggaggcagaatcgcttgaacccgggaggttcaaccccaagactgcaccgccgcactccagcctgggcaacagagcaagactgtctcaaaacataaataaataaaaaataagccatgtcacttctctgcttaacgagccatctcagtcagacatgggacccaggatgcaatctgcaccagctcccccgcctgttcccagcttacttctctctagcctccttgaacatgcccatcatattcctagtacatctgcttgggatacactagcccagaaatttgcagggctggctccactccttgttttattcaggcctctgctcaaatgctccctcctcagagagtccctctctaacccctgggtctaatattgaaaccccaacatgctctggccctggccgtgtcacttagcctggtttgtgtctgccccgccccgcaggttcccaggacagagatctgttctgttttgcacccccaggtctccccagtgcctcacacagcacacatagctctcagtaaaaacatgggctgggtggaagccacagatggtgatacagctcagaaggaagaagtttctcagaactttctaaaaagtgcccccctactccccactcctgcctgtgtctttctttctgtcttttccttctttctttctttttttttcttttcttctgaagcagggtctcactctgtcacccaggctggagtgcagtagtgccatcatagcccactgcagcctcaacttcctgggctcaagtgatcctcctgcctcagcctcccgagtagcgaggatcttaggcatgtgccaccacaactggctaatttttccattttgtagagatcagtcttgctctgttgcccagactggtcttgaacttctgggtgcaagtgatcctcctacctcagccttcctaagtgctgggattacaggcctgagcctctgtgcctgcctaccagcctgtcttttgaggcatgaaagcagagttctcctgtgaggttttgatagggcagatggtggcccttggggacccctgcatcccatcgcaagtgctgaagtgtgcaggttgcgggacagccgcacggaggtgctgcctgctggtatggagtgtgcctctgtggtccagcagggccccccagtacaatggggagaactagggcatcttggcctggtaacttccatgcctgtctcttccactgcccacctcagctgggcacccttctctgcctaccctggcccagccctcactgcccctccctccctgactcagtgggcacactcctgcctcctcatgccctctgggcaccctggccctactgcaggtggtgtctctatctacccatcacgaggaccagagtttgccactataacatcctcacccctgcatgagggtctccgtttcagatcctgtggaggcttcttccctctttcatgagtcagcacaggccccatgctgtgggcctgggcacatctgctttttccaaaggcacctcaaaagccccattcccgccagacatgttggctcacgcctgtaatcccagcactttgggagcccaaggtgggcgggtcacctgagatccggagttcaagaccagcctggccaacatggcgaaaccccatctctactaaaattataaaaattagctgggcatggtggcgcatgcctgtactcccagctattcgggaggctgaagcaggagaatcacttgaacctgggaggtggaggttgcagtgagccaagattacaccactacactccagcctgggcgacagagcgaggctctgtctcaaaaacaaaataaaagccggccgggcatggtggctcacacctataatcccagcactttgggaggccgaggcgagcggatcacttgaggtcaggagttcgagaccagcctgaccaacatggtgaaaccctgtctctactaaaaatacaaaattagccagatgtggtggtgagctcctataatcccagctactcgggaggctgaggcaggagaatcacttcaacccgggaggtggaggtggcagtgagcccagatctcaccagtgcactccagcctgggagacagagtaagactctgtctctaaataaataaagccccaccccacacccgacacagcctcctggatgctgcagcgtggcaccccatgcagtcctaccccctctctctgtcttcaagagctagtctggctctctcaggctgtggcgctcacagacgattctccttttccagctgcagtgctgaaagcatccatccttttcacttttttttttttcattttatttaagacagagttttgcttttgttgcccaggctggaatgcaatggcgcgatctcagctcaccacaacctccgcctccccaattcaagtgattctcctgcctcagcctcccaagtagctgggattacaggcatgagccaccacacccggctaattttgtatttttagtagagatggagtttctccatgttggtcaggctggcctcaaactcccaacctcaggtgattggctcgccttggcctcccaaagtgctgggattacaggcatgatccactgtgcccagccccatccttttcactttttatttattttttgtttagagataagtctggctctggcacccaggctagagtgcaaggggtgtgaccataacagcctcctccttcagggaggttagagagggctcaagtgatcctcctacttcagcctcctgagtagctgggactacaggcatgcaccaccatgcctgtctcatttttctattttgtagagacatgggatctttctatgttgcccaggctggtctcgaactcctggcctcaggcatttctcccacctcagcctcccaagtagctgggattacaatcgtgagccacttcacctggcaccctgttcactttttaaatgttctgccatttgccaggtgcaaattctttcagtccagtgggaagtgaggatttccacacatctactcacagcctgcccgcccactgctggagcctggcttttgcctttggagactccagtgcctggcctgtctgggttcctctgctcctatgtccccatcctgcctcccacacaccactcctctgcctccctcagctgggcccgcactgccacctgttctcctcctcgtgctcaccctgttcccacgggacttcaggggcctctgcatgggcttctattcttcctgcattttcttggcttttgagtccttcccctcccacacccttcatctcctggggcccccagacccagagagcatacagcacaccctgccattatctgctccaccgtgtgtgtgtgtgtgtgtgtgtgtgtgtgtgtgtgtgtgtgtgtgtgtgtgtgtgtgtgtgtgagagacagacagacagtctcgccctgtcacccagtctggagtgtagtgccacaatcttagctcactgcagcctggacctcctgggctcaagtgatcctcttgcctcggccttccaaagtgcaggaattgcaggtgtgagtgaccacgcccggccttcttttttgttagcttttgcttgtaacaaaactgccgcctctgtccttctctgagataattgccctcttaaggtcccgagtatagacatctccccttccttctcctcagcccgcttgtgcaaggtctttgagtgagagattcatgatcagccccaggcccttgtcctccccctccagccccatcctttccctcctctccttccctcctccctgcagagccaccacaggcctggaacgaatctgcagaagaagcccaagtgggtgtggccattctctatgtgacagtcgcaggcagcccaaagcctggctttcccctttgggcatgggaacccctagtgccctctgatttttctccaccacctggcctgctggaatgcaggtggctgaactcttccttattttgggaaaaatggcagaaatactggtttcattcttctgctttccactcctgtgatttggggtcattttcctccttgtacttacctagctgactgcttccctcatcctcctgtggcaccctatttctcatgtgactgtctcagtcatccgtggtttgtttttgtttgtttgtttgtttttgagacagagtctcactctatcacgcaagctggagtgcagtagtgcagtctcagctcactgcaacctctgcctcccaggttcaagtgattctcctgcctcagcctccctagcagctgggattacaggcatgtgccaccacacccagctaatttttgtatttttagtagagacacggttttgacacgttggccaggctggtctcgaactcctggcctcaggtgatctgcccgcctcagcttcccaaagtgctgggattacaggcatgagccaccatgcctggccaatccatgtatttattccttaggaggatctgtagcaggcacagtccagtgctgggatacaaagggcagaacgatgggcaacactgagcttctcctctaatcctcacaacactgaggctcggaggctgagtgagctgcccgggagttcacagcctcgcagagcggggcagagaggtttctaggcagacgcaggggaaggcaaggcagaacctgtgagttctcctttacctggacgtgtgctggtccctgattagtttccctcaccaggcctgaaagtggcccgagtctgagctggccagctgtcttgttgtacagatggggagacggggacccagagtgggtgagtcgcacagccagagccaggcccccgcagagtgtctgtgggcccctcggcctcagggagagcctggcaactcagacgcggggttccagcccccgctcctccccagccatctgtgcagcctcgtaacctgtgggtgcattttgagcctctctcccctcatcggtgaagcctgattgttcatccagatctgtttgtgtctggggagccccttccatgccagcatcatactgagagcacagctagatgtggtcccgccctcgtggtgcccgcggtccggtgggtagaacacgcactagccagactcaaacggttcactgtgaagtaagctccagtgatctgaggcacaaagcgaccaggtctggagaggtgggagcagctgccactgtaactttgtgtggattggaaaaggtccctctttccccctcactgtgtgggcctcagcttccccatccctacaagtgggcatgttagtcacgcccacctccccccttccctcccttccttccacccttgtggcctgatggtcagaccatgaaaaacatctatgggagcagaagggcaaagtgaccaacagcaaggatttgcagtgggacattccagcactttctagccctgtgacagcctctctgagcctcacccttgtggcctgtaagatggaatccacacctccttaatgaggacgctcacacgctcctccaccaagtacttggtagccaatgcctggcacttcggtgagcccttggtcacttttgttaacattgagacagactggtgggctgggtgcggtgtttcatgcctgtaatcccagcgctttaggaggccaagacaggaggatcatttgaacccaggagttggaggatacagtgagctgtgattgcaccactgcactccagcctgggtgatagagtgagaccctgtctctaaaaaaaaaaaaaaagaaaagaaaagagaaaagacagactaggggacagaaattgagtctgctaaggccccacgggctccccagaccagccagggcctaacttgccaccccctctgtttgccttcccctaggagagctccgatgccttcctcttggctgcagacacagactggaaggtaggtcaaggctcagacccccaagatgtgggactgacagctggcagcccctcaccccacctggccaggtcccagaggagggtcacagcccttctgtgtgccccctgcctaacagagagatgctggggtgggagatgaactggccctgcttctgcgagcagcagggaagagacggggcctctagggggagtgagaatggaaaagagagtgagggatgttgtcatctgaatcagcattttcctccaatgaaaggcaggttgactctaaaatagctcctgtttccatgacagctgttgccaggacaaccctgtcctccttagttgatgccaggttctccgtggaaactgaaagcgccctttgtttttattcctccgggtgatgatgttgctcactcggccagtcgtttctcccctctgagtcccacagtgaccattgatttccgggtctgggaaaatgcctgacagcagacacaagggaaccctgctgggttctggggccccactggccatcccgacatgctgaaccaattcagacccttcctcctggtaaggtggaagcagctcccgagtctctgtccttgcctgggcctgacctggttttgggtcagcctccaagccccgtgacagcaccagccaagtggtctggatgcaggggtgacacggaggcggggctgccctttggctcgtcccccagtgggagcaacgcgaggatcagtgtgagaatctgggcctgtgtgctggtccctcggtcacgcgccacttcaaggacgagaggggagacttcagggcagccaatgtacatgtgctcagatcctccgggaatgccatctccaagcacaaagggctctggagctggaaggagaggctagggttccggcagtggggagtgaatgggagcccaggaggtgggatgggagggaagtggtcgggagctggcccaggctggtgggaagggacagccggagatcagggcaggctcaccaggggattttctttgtcctccatgctgcaaatgaggatgagctatgcaggcaaatgggccctggaggagggggttggccaagtaaaatctcagagcagccagccggtgcctcaacacactggtcccacagtgtgggaggccgacgccaacagtgctgatgccagccccagcacacaggcccacggtgtgggggacaggcagaggggaatcctggagtcgtggaggagaccctaccatacctctgggttcccaactgctgctgcgaagctgcctctggcccctgagccctctgagctgcagccccggagttgcggggcccagggtgtgtgggaccccggttctcaggatcctctgcttggtaaaaggcaggttgcattaaaaggcaccttcctgtccactcctgtcacaccacatggaggcagcatttttttcgttttttgttttagaaaagcagccacaagaatggatggtcgttatctgggccaagacctggcagggattttatctcctgctcactatggcaggcgttgtcactgtcccctgcctccgtgggggcagccagtgggggaggtagtatagcagagggactaacatgagccagacagacctaggttctggccccgccacttccaagcatgtgacctccagcccaagtcactccatttgtctaccgcattttcagggagacaggcagcacggacctcccgagtgtttctaaggcgatggtgcccatgggcccctcatatggacactcagctgaccgtgacgagtggccaccagagtgtggagttagcaccaaactgcctgggtgtggttcctggctctgtgcccactagctgtgtgatgttaggcaggttaccaaacctccctgtgctttatttgcctcatttgtaaagagggtattaagagagaaaatgagtgctcgccccagcagcacatataccaaaattggaatgatacagagaagatgagcacgacccctgtacaagaatgacccacatattcgtgaagccttccatacttaaaaatattttccaaaaagaggataaaggctgggtgtggtgactcatacctgtaatctcagcactttcggaggctgaggcaggtgcatcacttgaggtcaggagtttgaggccagccttgccaatatagtgaaaccccatctctactaaaaatacaataattagccaggtgtggtggcaggcgctggtagtcccagctacttgggaggctgaggcaggagaatggcttgaacccgggaggcggaggttgcagtgagcagagattgcaccattgcactccagcctgggcaacagagcaagaccatgtctccaaaaaaagaagaagaagaaaaaaaaagagggatagagagaatgggtaaagcactccaagaaagcctggcacatggaggacatttgaacatagtgtttgccactcttgattctgagacctcaggcccacccagagtgctggggtactagtagctgccgctgcttactagccaagtgaggaaattacctaacctctccaactctcagtttcctcatcccttctcataggtccatgaggattatatgtattatccttgcagctgcctgtgcagtaggcactgctgtttctcccatttacatacggaggctcagagaggttgattgacttccccaaggtcacacagcaaagaagtggcagagctatgagtggcaccagggtttggctggcaagacctgggtttggctggcaagacctgagcctgccttgtctggccactgtaactgcacaaccaccagaaaaagggccaacaatttggagaggcacacaggctgcctcatttctcccctgccaggacctgggcaggggtggggtcagatctagagtgatttctgcagttttttctgattctcacagcagcttggtgagaaaggcacacagtccctgctttacaattagaagcctgagacacagagaggttaaaaaaaaaatcttgcccaaggtcacccggctggtagggggccaggaaggacttaaacccacgtctgtgggtttgcagacagctgagcagtcatggaggctgtggcttggagtgggcagtgtcgcaggtcagcttgtcacctgggtccaaaggtggggagaggccactcaggggtcagaggttggagtgggcgtaggattgggtggggccttgggggacatgggagggcattgtgggcagagggcagggctgtgcctcagttttccaagcctcttcctgtgccacagtgcctgcaggaatggggagcatggccaggaggtgacgggccagggggactccccattctacttcctgctgccctggggagcacagggcctgtcagtcttccctaggcctccagagtaagaggtgagagatggaataggtgcccccaggcagaggacatgaccagcaatagtgtacatagcaggtgtcgaccaggtcagcaggtacccagagatgaagagatgaccactttctccaagggcagccagtcagcatgcagggccatcagcatgggctggggtgagtggcgtgttccttcttcagcaagacagggagaggaagccggataggaggcagctactgacgttgacatgcccacctcctgtagacccacccggcccttgttcctggaggcaaccagtttggggcttggctctcgggtatctggggagcaggacactagggctatctcaggctctgtgccctgaccccacccttgcccaggccctggcaggagagaaatggggcagtctgtgtgcctctccaaactgttggccccttttctggcagttgtgcagttatcgtggccagacaaggcagggtcaggtcttgccagccaaaccctgatcccactcataggtctgccacttctttgctgtgtgaccttgggcaagtcagtcaacctctctgagcctccatatataaatgggagaaacagcagtgcctactgcacaggcagttgcaacgataatacatataatcttcatggatttgggagcataggcacgcagcagcccccttctctctgtggctcctgctctcccagccttgggccccctcctctgcttccctctctggcctatttcctctcctcctgtgcacttcttggcctttcttctcctctgctcactccacctgcaggcctcgggcgagctcgccacccagatccttgctgcccaggagaacagggcacggagcctgagatagacctagtgttctgctccccagagacccgagagccaagccccaaactggttgcctctgggaacgagggccgggtgggtctacaggaggtgggcatgtcaatgtcagcaagctgcctcctagccccgcttcctctccctggtggtctggagcccctggcagcagggtgagggtggggagggcagagctggtgtgtgcctgaccatacccctggccctgctatctgcccagggcccctggcccccggcccccaaactccattttcagcatgtggggaaaccccctgtatctgcgtgggcaaggtgggattttcatccctggtgggtggagaaggagcagccccttgaagcagggtgataacccaagttgccccagaaagcagcagctccccaggcctccacaaggttaagcgatggaaccttcctaatgggaaggctgggcgtgggggtctggtccccaagatgttgggcttggggccctctcgggccctccatactccccaaggtgtgggtcaagggctctagctgtctgggcagtgcccatgcaccctgccctgccccgcattggtaagctgtgcatgtctgtgacgaccctgtgtgtacctgacatgggtgagtctgtacgtgtggtctcggcttttgtattcggaggatcccgtgtgagctgcagctgttggcgtgtgcctatgtgctgggggcggatgcaggggctggggaccatcaaggatgatgtgtggctggggtgggaggagcagtgacagggctggggcaaggaggacttcagaagccaattggagccaggcttgtctcccagcagccaatatgggagctggggctcctggtaagcgagtggctgctcagaaaccctgcggggaggaggggctagctaggctgggccaggatccctgtataaatggcccaggagctgtgccccatcacagagccgaccatctcccactcgagctgcccccgccctctggacccgagtgactcaggcctttgtttgtccttcctggtagaggcgggttccctccctcggcaagatgccggagtgctgggatggggtgagtgagggcgctgcgggcatcaaggtgggccgggaggatggtgcatccttatgacccaccgcagggaggaagtgcccccctcaacccacatctggtggcagcccggccttcaaatagcctcaccctggggtcactgagacacggccagagtgctccaggttccctggtgatcctgtttgcaggagtggctgggggcagctgctagtcagagcccatagcaggggctggggggagcgtgtggttggggggtgggtgacatatctgcaggaaatggaacgtggaaggcactgtctgacttggctgcattgcccgtgtggacccgggcgctagtgcctgcatgtccctctgaccgtgtgccctctggtgtgcgcttggatggtgtctgccttggtgatgcctggggccatcaggccagggggcgggggtgtccttggtgagcccccgaggctgtgtgcccagtgtgcgtgccgggtctgtgcgtgcaggggctgccgtcccagtgggcggccgtctagcttgtttggatggctgcgccagtgtgatgggaaggacaggcggcctcttccttaggagccacctcacagttcccagggctctgctgcgccagccgggcagaggcaaggaggtctgggccacacaggaatgacagcctttcaggcaggggtccctgctggggaggaacgaggaggggttgcctgcctgccttattttgtaggtgggggaaggcaacgctggagccgtgaagctggcagggctaggggaccccaggtggagcccagggcacctcctctcgccggggcatcaggtaccccggccccattcttcctcaggagggagaggcaggggcagactcacccccacccccgggccccacacgcctgccctgccggttccgcagacgataggtcaccccgcacgcacggaggtgacgacgtcagcacctgcccgcccatgcagaccctgtcccctgaattattgatgcggctgacaggccgaaccacagcaccaccagcaccaactcccacaccggcgcaaagcccggctcaaagccccactcccctccagtgctcaaggtcacaggcgaggggagacggaccgaccgagaggagccgccacagccccctcccctgctgccgcagtgcttcccgcctgcgcctacctggaggcggggccggctctgacgtcacccagagccaatgggagtgctcggccctgagggttgggggcctcagagtgcaccgcgctgtggcccttgtggggctgcccttgcgcagcgctccaagggacggggatgtttggcttcgatcaggctgaactgagtcctgagctctccgcagagggtgagagaaggcgttagggaggttcgcagcagggttcagcgaaggtcactggacttcgtaggacaggtagcccggtgacgcccaggcccagccccagcccttcccatcctgggagatgagccctagtagagcctgatcacgtcacctcagggggatggggacaggggcggccacaccagggctgggagaagacagtggggcctcctcagcagcagagagcagacacccctcacacccctcaggcggacccgcacgctgcgggtctgggtttggaaggcaccgccctgggctctcgacgtctgaccccaggaggataactgtcctttatgcagcaggaggcgcattgcagttcttttgcagccccaccctccagagctgagagaactcacaggtggctgtgaaagggctgcctggtcaggagctccctcgggtggaacctgatctcctgtgaacatgcagccttcagtgcaccgccctggcccctgagactggcacctggcagggcctgccctccctactctgggattgaccttgggcaagtcatttccctttcctagcctcaatttcctcctctatggcttgggcctatgtgggaagtaaatgagaaaactgtgggtcagtggtcagtggcggggaagtgttcctggatttgatgggccccgagaaaggataggcctgggatgggaggggctgtgtggtctgtcccctctcagccctggtgtggcctcctcatcccctgggtggtgcaatcagccgcatggctcaccctaaggctcattacctgggctctcctggaggacaacagggaaataaaaagggcctgcaagtcaaagagtgttctccagggtagagcctttggccaccaggttggtgccagcttgtcactccacactggagacacaggcctggacagtggtcctctgagaccagacccactaatgctggcccctgagcagctgtcttctgctgtctaaatctcctttcccatttggaggcaggaactcaggttctttctaaaccaaagtgtcctcacctgcaaaacagggactagggttcctgtctcttgggtaacatgcaggaagcctggcacacagtaggtgctcagtcgcttgatgtttctttcatgtccttgaccccagccccacctccaactcactgggccactcacgtggttcccagggctcacaatgatgcagagaggatcggtttatttagctcagatggcccctcttgaagtttgcccatccgagtggctaagaatgcccagtttgcaaaggaacagcgagaagggcattctcccaaggctcagggatgccctagcataacagccccctttctggggctttctccaagtgctaaatgctccacaaacattggcttgtctagttcccgcaaagtccctgtgaggtggttctggatggagaggctgaggcacagcagagaagtaacatgacatgctcagtcacaagtaaggggtagaaccaggtcttcctgaggaagtaatgaccttgagcagcaaaaccaaaggtgtgaactcaagaggatcccagagcaggctctgcagaaggcctctagaggggatggggaggggggtctgacccgggcctgcctgaagggagcccttgaggatgctgggctcacacagaagggcgttcaaggtggaaggaaccacatgcgcaagagccttagagtgggagccaggggcagtgccggggtcggggctaggcttggctggcacggggtgttttctgaggattccaggcaggaccactgaggccgttcccctgcagcagcaggaagtgcctgagagttctgagtgtgagagggacttgggctggggaggcagagctgtccaggaggggctgctgcaagatggagaaaaacagcctccctggaccctcaagggcggaggacagtgacagcacaaaccagtggctggtttgcagagaggaccagaccttccccatgcagatcagttcacattgtctctgtactgaacagccctgagaaggggtgttccatccattcagtcctctctgggggcttcttggggtgatgagaacaggatgccccaagtaggggctctaccacaggcctaacaggtaccaggctgcgtcacctcattccccagaggagccaagagcggaggctgcccagagtgtccagcacggtctctccccttcaggaacatgacatcgagacaccctacggccttctgcatgtagtgatccggggctcccccaaggggaaccgcccagccatcctcacctaccatgatgtgggcctcaaccgtaagtgcagcccagcctcagtcagccctcctctgcctcccatcagccagagcggtgaggccccccaccctccccacagggccctgtcagccccactcacactcacctctgttgccttcgccctccgggcctccatttccccgacggacccgaggcttacacttctgccttgcctgccctctgggggcccggccttccttccagtcccccggcccctctgctcagccatagtggaagtgtgtctttgcagacaaactatgcttcaacaccttcttcaacttcgaggacatgcaggagatcaccaagcactttgtggtgtgtcacgtggatgcccctggacaacaggtgggggcgtcgcagtttcctcaggggtaggtaccctgagccccctctgcctgtctccagctctgcacctgaggccacacctgggccctgacctcctgctctgcctgcaggtaccagttcccctccatggagcagctggctgccatgctccccagcgtggtgcagcatttcgggtgagtccccgcacagcccctgcgctagggcccaggggtgcctaccccaactgcagagccacctggctccagctgagggcttcaggctatgggcagggcctgctctggatgacatgtatgggaaatggcacccctagccctagagtgaccagcctgctctgcaccaggttcaagtatgtgattggcatcggagtgggcgccggagcctatgtgctggccaagtttgcagtgagtctccccatgcccccattaccccaaacaccagggcaagccagggatgtcccagtggtggggactggggggaacccttcagccttgaggaagtgtccctgctctcgcttctcctcctcccacctcctctttatgtagaaaacctcttttttcttttttcctccagggaaattaacttttttaaaaaagaggttcctttctccatatagttttctcaagagactagaaactataacttgcttaaactattatccaaagccagaatttctagtagcaacaaactatacaactaactgctctagccactaaataaggatcgtccttcactaattgccatggtatttcaacatgaataatttttttagcaaaaaattttattatggttgggaggtttaaagaaggcacatttcaaaaacatcattgtcggtggctcacacctgtaatcccagcactttgggaggccaaggtgggcagatcacgaggtcaggagatcaagaccatcctggctaacacggtgaaacccagtctctactaaaaatacaaaaaattagccgggcgtagtggcgggcgcctgtagtcccagctactcgggaggctgaggcaggagaaaggcgtgaacccgggaggcggagcttgcagtgagctgagatcgcgccactgcactccagcctgggcaacagagcgagactctgtctcaaaaaaataaaaaaataaaaaaaatcattgttgggtaggaattcacaagcttttcatctctaaaaacaagcaaaaaaaaaaaaaacaaaaacccaaaagactaatttttcacgatcgaagacatttactacttcaaaagaaatgaccaagaattttcaactccagttgcaatgtcagcacttaatcattttgttaactggaggccattccctgccaccctagacaagcttgatgtggttatgctgtttttctttaagcacagtctaacagttgaaaagaaaatacctcttttgcaatgcctacggcaaaacagactttgaaaaggttgtttttttcttaatttatatcatgagggcttcattttcttttttttttttttttttttttttttgagatggagtcttgctctgtcgtccaggctggagtgcagtggcatgatctcggcccactgcaacctccacctccctggttcaagcaattctcctgcctcagcctcctaagtagctgagactacaggtgcatgccaccacgcctggctaatttttgtatttttattagagacagggcttcaccatgttggctaggctggtctcgtatgcctgacctcaggtgatcagcccgccttggcctcccaaagtgctgggattacaggcgtgagccacggcgcctggccagggcttcattctctataaaagcaaaaaaacaacatgcttaagattttaagatgtttaatactcaattttgcacttcaaaaatatattaagagctgattctgttgaaagagcgtgtgtgtgtgtgtgtgtgtgtgtctgtgtgtgtgtaggggtggaaacaatgatagagattctaaataaatccaagaactgtgaagggttcagtgagaggaggacaggcaggggcatctggacatgggtgtgcatgcacagacccggctgtagccgggtggctgatcagcagcaccttgaagactttacagagtgtttctgccatctgcacccatcctggccccgcccggccctgtttcccctcttactgcagctcatcttccccgacctggtggaggggctggtgctggtgaacatcgaccccaatggcaaaggctggatagactgggctgccaccaaggtgtgtgtggtgaccgggggtggggtgggtatacctagggtggggtgaggggcggcactcacgctggcgccctgctccctgcagctctccggcctaactagcactttacccgacacggtgctctcccacctcttcagccaggtaagggggggaacttctgcagatctggggtgatctgggatttgcccctcccagctggctcggtaggaggcaggcgagtgtctttggcatctgacctggctcactccagatgctaagccatctgaaagacagacatcccctcccaaggccccacacctcctacctgcccccaccctgtctcccctgcctgctgagtggggcaagggccactctggcagtgacatctgccagccccctctaagcctgcgtccctctgtctgcccctctgcatgcctccatccatctccctgggcctaggaggagctggtgaacaacacagagttggtgcagagctaccggcagcagattgggaacgtggtgaaccaggccaacctgcagctcttctggaacatgtacaacaggtgcgggtgggatcagcagccctgggacccagcacaccccagtgggggcccttgcacactgccccctgagggaggcaggcagacaacacccttgccctggtttgtagatgggcacgatattgggcctcaaaggaggtcatttcctgcacaaggtcacaccctgtgaggggcagaggggaacagggtttcagactccgggccttgggctcttccacttttcctcctcccctgggggcttcccgcttgggaatgttgggggtgttagtgacatccctgactccagtaacccagccttgatgttgacgtctgcaaaatgaggaagaggtcggatgagcctgtggttttcaagctgtgctccttggagccccctttaggggctgccctgccctgcaggaaggtggccaggccccctcactcacgtgccctccttctcattcttctacaaatattaagcacctgctgtgtgcatggtgctaagaaaacaaaacaatagagaatagagagacccagggcctgccatcccatatggtccaggagacaggccagtagcagaaactcccacagcacaggtggcggtgcgcatggctctgagggggatagagagcaaaatttgagagcccacctggtatgtgctagggagtccaaaaagccgtgacagggagcctccagttcatttatgcagagcaggtccacgcctccctgctttaccaattggcagtgttgggcttgggatgcccctcatcctgtcctggggtgcccacctctgcctctgcccctccccctgccccacagccgcagagacctggacattaaccggcctggaacggtgcccaatgccaagacgctccggtgagtggcccctggccctctggcctgccctggcctttgcccccatgacccagccagacagcccttttcctctgtatctgcagctgccccgtgatgctggtggttggggataatgcacccgctgaggacggggtggtaagtgaggggctgtgggctcactgggggtgggaggtaggggtgaggggctcactggcccctgcccagcagggacaattcttgatccagcccaggggagcctccagggccagcagtggacggtgggcttcttgtccactttcccacagtcttgccaagcctcacatctggcatagcccccatccttctggctggggaggcctggaaatggggagagctggggccagggctgggccatcagaaggtcccctcttccctccccagcagcacagccccaacttggtccctacccacctcaggcccagggtgtacgatcttttttctaaaatgtgatcaagccattataaatcattaacgcatacagcggcacggtctcccttttcccgtcacctgcagcggttatgtttgggggccgtgtgtcacctctcctgctggaactctgggagcaggtggcctgaggctgggatgccccatcagcacagagctgctgggaagctgcagggtccagaagtgcccagagcagccccgtgcgccctgaaaataccaggctttcccatgcccactgggaggtcctggaagagcagggtggtgggctgtgccagccccctccacccagtctctctcagaccctcggcacccctcacctcactgccgagggcactggggctttcccaggccagtcccaccacggcagcccagccctcgcctgactcccactcctagcagttgtgagtgggctccaagggtcccaggcccttcagtggggctgttaaactggtctccaagaacatggggagccctgggagaagaaagcctgggaggagcagcctgtcacagctgctgggcctccctctgcctccctgcaccccctctcctccccgagcttggggcatcaaacctgccttggcaatgggggtggggaggggcaggggctgttgctgaagctggctccttgtcctcaggtggagtgcaactccaaactggacccgaccactacgaccttcctgaaggtgaggctttcttccccagccctgggccagcttccctagcatgggcccaacctcagggaggtgttttcctggggtcccagccagggtgggagcttgtcctggagtgagggccctgctcaggtcaccccactctctcccttgcagatggcagactctggagggctgccccaggtcacacaggtgagacttttggccctcctgcccttacatctatggggagggggaagcctctaccctacctgctaatcctaggcagccaatgaaagcatgtgcttgtcctgccctccgcagccagggaagctgactgaagccttcaaatacttcctgcaaggcatgggctacagtgagtacatttccaccccaccccacaccacctagagaccggtgggcaggcagtgctggggttggggctcctgtttgcagggctggcacgtggtgtcaggtggtagtagggagcccataagcataggagttttgtgtgacctgggccccggatgctgggccccacagatgccacctgagttgcaagttggccatcccaggctgtgcccaactcccctttgcccttagggaggacttggcgcactgttctgatggcagtgctgggcctactgggggaagggactcttccttccgtgctgggggtccagggccaggggccgtgtcctgccagggaagcctgtctgggggtgaggcacactcccctcacccgccccagggcttggggtcagagctgggtctatggcacctgagaaggccttttgaaacaactcatggctgcacccaggggcatcataggagtgggcttggagtttggggccagggaaggcaactggggccgcctggcattcagagagctgaaagcagctgaacctggcttggcagatctgaaaatctgggtctggggtggaaccaggtacacacacacagacacacacacacacacacacaacacaccccttgtgtgtctccttgacttcccccttccctccaagacatacctgttcctccaggtccccactgccaggaggcaaacttcctcttctcagtttgttttttgttcccctccagacttcagcctctggagctatctccagggcaaacaggagggctgcctgtgggaaggctggggaggacacccaggaatagaatgctctctggagcagggcagagccctagggcccacagggaggctccgcaggagcacagagtctggaatcagggcacagcaagcatttgcgaggtgaacggaagaacattgtcaggcgctgagacgcgttctcagggtcctggggagaaactccaccaggcagccccaagctgggaagggcacagagcgggcaggcctcccccattctgtatgcaggagactgaggcctaggagaatggtgaggggataagcaccccacctgtcagggcttccttgggccagagatccttctgggggccactgctgggtgggcaggcaggagtgggcttccagaagcctctggccctgcccccagcctctctgtgcctgtcctttgtcccatctctctggctcatctcaatgcccttgactcagcggaccacgctcttcactgtgttgtgtctcccccatccccgccccctctccggctctgtcttctctcttagttgcgtacttgaaggaccgaaggctgagtggaggagcaggtagccccacggcccttcccctgatgcatggacgcccagcctcctcctcccccgctccttcctctgcgcagtgtgctgcagccaggccgcatcttgctgtggtttggaaccttcttgtgtcctgttcaactcagaaaccccacagattcttgcttttctgcaggcttggcctctaggttggctgggttgcagagcagtcttgcttctaggttgtcatgagctgcgtggcttccagagctctggggataggaaacagaccctccttagaggtagagcccaggcctggccctgcctgagccacataggtggccaggagagttccggagggtagagtttgctgcccgcaagtcttgcttgtgaaactctgaattagggaattagggcacagtctgaattgagggcagtatgcgaccaccgctccgcgtcctcctttacagaaacagtcctacttctccactggcatcctcttgagggaggcacggctggaaacccagcacctccctgcaccagctcagggctgcctggtcagctgctggccgcagccccctaggcccactcactgtcgccggccctgcatgcccccagcccgacagctgtcgccagcctcctgactcaggaggagccctttgtgccttcgaggaacggttcgctggccgctttgcttgcagcctacttttcccaccagaggcacctggccctgcccgccagtcctcaggcccatcctgtctctgtccacagtgccctcagccagcatgacccgcctggcacgctcccgcactgcatccctcaccagtgccagctcggtggatggcagccgcccacaggcctgcacccactcagagagcagcgaggggctgggccaggtcaaccacaccatggaggtgtcctgttgaagcccttgatcccgctgacgacgcccacgtcgaggccccaccgccatccttgcgccggctcatgttccctttagtttatttttgtgagggcaaaggggaggaaatggggttctgtttgaaaaaaatgaggggatcttagatgctgcagcagaacagtctccaggtgttttaaggggctcagtcctcctcatcccatctcactctccgtggtaacttagccaacttgacccctctcatcccactcccggcggcccaggcacagaagggcagggccatagggagggagattcgctacggatccaggccattcctgggtgagcccttgggcaggcatgtttggagatgagagaggcttcgagagggtgggtgctgggccacaggggtgcggggccagctcaggcactggcgtgggagccctgggagaccccttcccccaccctccaccaagcacacctgtttctgtctcatagcacatgtgacaatcatctggacaacagccacaagggggcgctcggaccaggcagccactttcctggtgctctctgggcccagctggtgctgtagggccacgcaggcaggggcgtcaaggggtttctctgcccaaggaagacagaacatggagaaccgtcagggcaggaaccccacagactgtcccttccagcccacactctgccacctcctggccctgtcccaattctgagccaaggcctccccgaggcagaagttgcctggtcctctgtccccacagtgacctgactgggggtgagggagaaggaggagagagcccatgtgtggtgtgtgtgcccctgagaacttcgtggtgactgcctttgggagcccgcaggtggccagaggcaggggtagctgagttcctggagaccccttttttgcccccaggttccccagagggcaacgccatcagtagcagtgtggtgtttcaggcagagctctggccaggctgtgccagtgtgtcccggacgcatcactaaggaagagagagtttatttagtcaactggcccaaggcagcgaggcttctacagtcccacaccccatagccgcctgggctggggcttactgggggctgaaggttctggacatgaacaagggtcaggtagaagagaaaggcttcccctacaccccagcctcctgctgtcccctgaagcccaggactgcgttgtatgctttccatccactcaccttaccccatagcatcttgcggcccagaaaccagagccatttgtctcagaccctaaatcaataatcacaaaccccaaaacgggagagagcagtgaaaacatgcagggctgtggacgggggaagggttgtggcgggtgttctgaggctgagaggacacctatatgcgtatttcctctacacacatcaccccccttctataatcttaagccatgactagcctggtggcgtgttagtttctgcccagttctaccccctcatgtgcttcttctgaatactgaatgtgactgtttgaaagctggtagaattcatccctcttactgtagataacactgcaaatcttggaattttgttttttgctgtttccagatgtatctataaatatctatacattatatgtgtgtgtgtgtgtgtgtgtgtgtgtgtacatcgggtcctcccatgtgtggtgttcttctggaggttgtctctttggtcaaggtgaacttttaatgtttattattttcttctccgcacaaagtaaagagcctaattttgtgtattctggtggctgctgtcatgagatgataaaatgtaaaacaaaactctagtcaacgtagaaagagttaactgtgctgaaaaactaataaagaacctaagaagaattccagtgtggtgatgccatgcccatcatgggaggcttttggagaaacagaatgtttgggcaggggctgctggtgctgcttgggttttgggttgagggtgctaggagaggatggtctccacccatctttctatttccagtacacgtcacattattttaccggtgagatgagaatgtcacaaacattaaaagccttatgtgctcatttctgcttatgtgctcatttctcccctgactctgtgacaaaatacagctctcctcagccaggcacggtggctcaagcctgtaatctcagcactttgggaggctgaggcgggcagatcacttgaggccagcagttcgagaccagcctgggcaacatggtgaaaccccgtctctactaaaaatacaaaaattagctgagcatggtggcgcgtgcctgtaataccagctactcgggaggctgaggcaggagaatcgcttgaacctaggaggcagaggtggtagtgagtggagatcgtgccactgcactccagcctggatgacagagcaagactctgcctcaaaataaaacaaaaaaacaaaatacagctctccagaaaaaaatgccttaaagacaaaacaaaacacccctgccctccaaatctcttgcctgagtcactacattccttcaaagataaatgacctactctttgccttctcctaaacatacgatcatgtctgacagggttaatgattatactctgcaatctataaccagatatacttatccctaaactttgatatgattttacacatactaaatcttcacctatgtataacctaaactaaaataccgtgttagaggagcctcacaagattactcctgggctacaggcctcagtctatagtcctcaataaggcttctaaataaaactaattttaattatttaaaagcttaatattttttctttagtcaacataccaatccttacattaattctacagagtaggtattatcttagtttcgcaggtgaggagactaaggttcaggaaaaaggatttgcctgagtaacagaccaggccgcgcgcggtggctcacgcctgtaatcctagcactctgggaggccgaggcggggggattgcctgagctcaggagttcgagaccagcctgggcaacgcggtgaaaccccgactctactaaaaataaacacaaaaaattagctgggcatggcagcgtacgcctgtagtcccagctacttgggaggctgaggcaggggaattgcttgaacccgggaggtggaggttgcagtgagccgagatcgcaccactgcactccagcctgggcgagactcccgtctccccaacgcgccaaaaaaaaaaaaaaaaaaaaggaaaaaaaaaaaaaactgagtgttgagctgcggcgttgcttggcttcaaaacccattcctgtaacctctatattcacagcctcattttcttacatttaacagcatgctacttccccaggtttaaccaccatttgttttattcatttatttacccaataggtagatattgagtccctactatgtcagctaataaaacccaccacgtgctatgcagcagattaaaaacgaggatgtactggcaaataagggcagagaggatctattctagatccaggagccctctaggccacgccactctgaaacacacacgaaaactgctctgaacgaataccaccagtaaaagggttccatgg

SEQ ID NO: 393 - DNA, 63433 bp, Homo sapiens
  source 1..63433: mol_type = genomic DNA
tgaggtaggagggttgcttaagcccaggagttcaagaccagcctggacaacatagtgagaccctgtctcaaacagcaaaaagagtagatctcctttggttctaacaagaggggatgtgagattcaagatcagagcccactgtccactctgctgtcttttcgtgcctcggtgtccccaagctgctgcccaggagcccaagggtgggcagtctttgtctgacacaggaaccccttcacttcacatttaggggattgaggcctagtggagcagggactcacccacggccacacagggggtcagaattactgttgaggccagaatccagaattgtttcagttccaaccaggaaggggtttgtttcccaaaacctgtccctaccccaccccttctttggcaggcggagtagctgtcgccctcagggtggcccagagcagtgctgggggtagagatgaaggtgccttgtgaagacactgccaagaaggggtggggcaacttccaagaggaagagcaccaagaagcccaaaccccagacggaaaccaaatgtattttctgggccctgagaggatatttggaacaatggaggtgggatgagggaagttaaaaagggcttcttgatatccttagaaaaaaaaaatacaggctttaagtttgacttttgtttctctgaaggatgtttgtgtaactttctgaaggcaggatcccagcactctgtgaagcttgtcagatgctgtttttttgtttttttaaatttttatatttttttgagacagagtctgctctgttgcccaggctggagtgcagtggcgcgatcttggctcactgcagcctccatctcccgggttcaagcgattctcctgcctcggcctcccgaatagctgggattactggtgtgtgccaccatacccagctaaattttttttgtatttttagtagagacggggtttcaccatattgaccaggctggtctcgaactcctgacctcaggtgatctgcctgctttggcctcccaaagtgctgggattgcaggcatgagctaccacgcctggccattaggtgctgtttttatagattcagggctttggagctgggaaggactcgatcaagtagtctcctcactttatagttggtgaaatggaggctgagaggtggggggcctgcttgaggtcacacagtgaggcagccgaggtcttggatcttcctatgtgttgcaagaggctgtccatcttgacttaccacctcctgggacctggctggcatgggggctgggcggtcactgatgaggggttcccttcaaaatgctcattgctgctggggataggataaggccaggtctggtcttgggcaagatgagcccactggtggggagaaggctgagatggtacacctggtaatgccaccctcatccagatgccaggcccagctgtgcaccgtctgcccagcagctgggagctgtgagtcacacccagtggatacagaggcgcaggccattgtgtgccgtgattcattctgttctcccggccccgaagggatgacgaggccctgagcaccgatccatgcccacgcctgtggatgaaagctgatatgaggaggcccaggggacctgagggagtcggctccctctgctacctcctgtctcttgagtatcctgtgatcgtgacctgtccattcccaccagtgcaggggtccatgagcccccaaaggtgcagtgagttgtaggcatttctgtgttttctttttctgaagaaagagtttgttggtttcatcagatcatcagaaggctgggtgtccctgtggagtgctgacggggccgtgtgcactgcgggcttgagaaatggtggcagcgtggtgcaaatagaaagtagcctggtggcagtgtagcatcctgggtcagggtgtggtcttggagacgggctgttggcttctgagctggcacctccacttaggagctgtgtgacattgggtaagttactttgtctgtgcttcctcagtaaaatggcaataacagtatttatctcatggtgttatagttagacttttaggtaagttaatgtttgtaaaggacttacctcgtgcttggtacaaagtaatcatttggtaaaagtttgctgttggtagttctagctctgctatgaatttgctgagtgatcttgtaagtgtctgatcctggggtcttagtctccacccctggctccgcactctgtgctgggctttctaggagctgcaggaccagcttagagagcaggggtgggcaggggaggtaggggaaaccctttctgcattctgggactccctagcccaggccctccctggctttgtcctgaggcagggttatgtaaccagccgggtctggccaggcagggcacgattctcaacctccttttgtccctccattgtctctttctctcccttccccccacggagctgtcgttagctgacctgttcctcaagctccagggatgaaattggacccttgctattctgccaccaattgatttagtttagtccagaggtttgctgggctggcggcccctcctcccgctacctggggacagcactaaactgatacctctatgcctgcttcatgcctcctttttggggaggaaacacaggagtctagatgacttgggctcttggtccagcctgccaggttgtagggacaggatgttcctgcctatggcctctgaagttctagaggtacaccccactccctatccaggattccttccccagaagagccttctccatccttgcagcccagcaccaatgccttctcttccaggaagccttccaaggtacctcagctgcagggaagttggcctctactgagctccacagtgtgttctctgtcccttttaagaaaacagaggtcacaaactggcaggccacatttgccctatgggcagattttgtttggtccatgccaaatattgagctggttgccaaccagaggttttacataaaaactcagacttctggctttatttcaaaaattggaagacaggaaaaccttgagcctacattctccaggggtcattgctggaggtgaggcatgtacacttcaccccatccccagccagccatttcatatgcttacatgatctttctggtcactggaggcatctgagtttgcaaccctgtccttaagctatgaaccactttctctcctaccttgttcctttgtgggctcttctaaggcagcgggtgtaagggctgtgggctgaatcacctttgtgtccctcgaagcatggaagcattggagcatcatgcttaggctcaggacggtttccccagtaggagcataacaagtgcttcctgtgtgaaagcaggtgtggccatggtctatccctccagctgtgaaggttccatttgctagaggcctctgggtcagcctgctctgtgaccctcgaatcctcccccaagataagctctgcctgcgtagccactgacccaggcggcttcttaagctgcagataacagtccctgaaagggcgggccccaccctgcagtgtaaccaaggagaggagcatccacctgcagctgtcaccaggtcttactctcatggtgggcttggaggagtttagggaggggaggactgtgctcagcagccttcagaggatatcaggtccagacctctgtgtgctgaggccagcagggtgaagaggggtgtggaccagttcagatgtttactggcctgggcttcttctccattgggcctctctgtgctttctcctcctagagtatgttgctttatccgacagctcccttgtccaactgtctgtcccgtcaaggtttatttaactcattcaattgaaatcttaagtattccctggggcctgctaagatgtcttctcctggaagaggtcttagctgagaggttgcaattgttctggctacaggaaaaacctgggaagcttgcaaaaatgcatgcagattgctgcccccacccgctgcctcctgctctgattctttcattctagggtgtagcctccccatcctgagaacattcagaccagggggtctatagaccactctttaaggactgtcttagtgcatggagcccagggctggtagggaggagccttgggtggctgttgtgctgggcgacattaaccatgcccctttctctctctgggctactcttttgccccctgtgccaatgttctgggcttccccagttgtcgtggctgagtgcaatgtgagctatccttggagaggataacacagagtggattggggcaggtgccagtgtctgggtggggtgagggctgccagtcctggccccaccctagccaggcccagaggagtttcacattcacattagggaacaggtcaggagaggaggcagactgaaagcctggctcaaagtgggcaagtgctgtgcccctggtatcaggccccacagggaaagcctggcctgggtggcccagtgacctggccacaggctgaggggctctcctgctgtgtggtcctgtggcaggcaggctgaaacatcaagtgcaggcatgaacaagccatttacagccgggtaaactgaggtacatagagggaagacactctcctaatgtcacttgagtgggtggaaagctgggctgggaccccaggtcttccaatgccaggcaaggccacactcttccatctccacctccctctgcaggggcagtggcagatcatctagctgggacaatcatctgattgtctatgacgacctagttagagcctggaaaaatgaaccatcgtcacagccaccccggaggcatgaaaccggttgggtgtgcaaattacccctcaaacattctccatcccattttttgttgttgttgttttgtctttccttaaactatctgatgggacagctgcctctgtgcccgcttccgcctgacactgggcttcgtgctcttcattctgagaacaaagcttccttctgatagtcctcctgctgaccacaggaaaagggcaagcgtagcaccagcctccctcctctgcctcctcttgctgggagcatggggtaggcagccttggatggatgctggaaaggccatgaaggtgggtggcggcggtccagtccacattccctctggcagcccaactgtcaggactcagaagttctccctcatggccaaaaggagaggaaaaggcaccggacagggacaaacgtaaagtcttgtcatccattggtccaagcagtcaattggactagaacaggactgggaatttggctgggaactggccaggcgaaaaccctcagggttttagctggcccaggttgagtcttgtatcagcctctagcccctggtctgtaggggctgtgtaagcctaaagttgtgtgttcagatgagggagacaatagtccctcattcagtatatttgtattaaacatctactttggtccaggctcttttctagaactgggatgcagcagtgaacaaaacacatggagaccctgttttggacgtggggctgacatttgagtggtgggatgaaatgaacagcccaacaagctcactgtcaggtggtgagatgtgcctggaagaaaaataaaactggcttgtgggtcaagagtgtgatttgggggagtgacccagccatgtcaggtggtcaggatggtccctggtgaggggcagtagactccgggagggtggcccacgggaaattgagggaagaattttccaggcagagggagctgcagggcaaaggcgctggaactggagggcatgggtggccagaggcagggctgaaagaatgagaggatggtggaggagaggggccagagggcatgtggagacaggtagggcctcttggccatggggaggactttgttgtttgagtctgagtggaggggaagctgctggcgggcccgatgtgaggactgactggtttgggtacacattttagagagactgctgggggtgagggtggacgcaggatgactagctgggaggctgctgcagtcttgccacgagagaggttgggcgagtcagtggtgggtggggacggcgggggagcaaccaggggttggttctggatttattttgcaggatgagctgatgggatttgctgatggattagatgtggggtgtgagaatagagtgttgaccgcaaggtttctggcttgaggaactggaaggacagttggacagtattgctatttaccaagacagagaaggctgtgggacaagcaggtttgggaagagcaattaagatttggggtcagctgtgctggggtggggcctatgctggtgggggaggggcatggtgcacatgggtgctgggtcctgcatgttcctgttgctgtcaggaacagcaacaggggttgtgtgaggggccccaatgctaggagtctgttctgtgagaacaaatgtttcctggtcccttcatgtccttttctctctctgcaaacctccctctgcttttctcttccttttggacgaggaaaaaggcagattctgaagcctcattgtcactgtgatggtcctagcctttctgcctggcatgcctcctgacagggagttccttctggggtaggcaaggttgggggcggaagggtggggtggaggttcaggccttatcctggctctgctaccaacagagctctttgccttggtttcccctcctgtatggagaagggttgaggtggccccagggttctgagggtggcagggagcatttgaggaggccacatggcacagtggttaagaatctgggcttggggtcaggcaggcatgggcatgaatccttgcctgctgcttggctgtgagactgtggacgagtaacataacctctctgagcctcaattttctcatctgtagaaatgggccagtgatagtacctgcctcacagggttactgtgaggttgaatgaggaaatgtccataaagcacttagtgccaggtgcagtgactcgtgcctgtaatcccagcactttgggaggctgaggctggtggatcacctgaggtcaggagttcgagaccagcctgaccaatatggagaaaccccgtctctactaaaaatacaaaattagccagacacggtggcacacacctataatcccagctactcaggaggctggggcaggagaatcatttgtacctgggaggtggaggttgcttgtggtgagccgagattgtgccattgcactccagcctgggcaacaagagtgaaattctgtctcaaaaaaataaacaaacaaaaaaataaagcacttagcaaggccctggcatatagcacacctagtaaaccaaggcctctgctcacagtgacccatgcaggcaggcaggtaaggggcttggcctagtgagtgggaggaaccgtgggaggttattgaataggagcatgccaggcatgtggtttgatggggcagctgtgagtgtggagacttgggctgagttttcttagcaagtccaagagccccttccaccttccagagtgagagctgcgggccggccctaatggaccatcttcctttccctagccaagggtcttcattggcttggcatgggcagcctctgttttgcacaggtcccttggggtggggtggtcattttccttaaggcctcctataggaccccttgtctctatatcccagtggctagccttagggaaatgtgagggaagggctttgggggtgtgtgacatcaaagggacttaatttacgtgtaggtagggctctggacagggctgatgggtcaggcggatcctggagtggcagtccactggacactgggagtgacctcggtttctggtctgcatccaggctgggtggtgcttgctccagcagagccgtggagaggttgacaatgggtggaatgtggccccttcagaacccacacttcactggtgcccaggcatgccagccaagccctctgcttctgcaagcctgtttcccagcagttgagctgtgccaggacagccaaggacatttcagagtccccagggctcatagccaggctgtcaccgggcattgcttattttcccagggcccaggagtcttcagggatggtgggggttctggagatgttccaaggacttttcttaacagcttggtaaattgaggtctggagagagcaaggcacttgaccaaggtctcacaaggccgcctccctcatatctgccactcccctctgtttccgtgtcctctgcacagactcctggccttctgcctggacgtttgtaacaacctccctcttgtgggctccctaagagctttgtttgtcctccattatcgtaatcttgccataatctgccagatgcacacactatttgatgtgtctacctcctgtcccctccactgactgcccgtgacagagtctccccgacagagctgtgcagcatgaggtttaggccccaggctctggagccagtctgaactctgtttggatgccagctctgccccttcctggcctggtgaccttgggcatgataccctacttttctgagctgctgtctttgtgaaatgaaaacagtagcaatacttagttgataggaatgtcaggacagttaaatgggataacgtgtgaaatgcagagtacaacacctggtaccaagtaaactctcagaaatggtcatcattgtcccaaaggcccatcagttggttgaactggaaagtcgtgagcatggaggagtagacccaagcttggactgggaggcagaggatgtgggctccaagttcatctcaaacattgtgttcctgtgtgcgtgttgggaagccacttatcctctggaaaccccactttccttttctgagaaagggggaagaaatccctgctatactttaataaagttggcatgtgataccgcagcaatgcctgtgaaaatgctttgcatctgtgtaatgatttaaaaatggcacagcggtggctgtggtgtgctgatggcgatgagggcattgtaaccacagtggtgggcagctggccgggctggaggctggttcatctgtggaatgcttagtgcccacacggacttccccatccctgcctacctgctcccggctgtccaccagcctgccttcacattagccccggcattatatgctagaaaatgtgggaggtgcaaagagctgatggcatttccccagccctggtgggttttctgttatctgtggctgatgccatggaatgtggggattaagaaccagacagatgctggttcgaatctcagctaagcacttcccaacagggaccttaagcaagttgcttaatctctgtggacctcaggctccatatttgtaaaatgaggccatgatcaagtagaggccaagcatttaacaaagagcccagaacataatggcatcaggtggttgtataatgtgtattctgcctggaacgtggtcactgacaacgtggtgactgacaggttatcgatggcaggaagctggggccactgtgcccatttcggggatttgctgcagaggtcggttatgctccctacagaataacccagcttagatttaggagggtctatggaatcatatggcatgattcaattttttaaattaactcgttttttaaaattttattttttttagagatggggtcttgctgtatctcccaggctgcagtgccatagtgcagttgtagctcactgcggccttgaatgcccgggcttccagcaatcctcctacctcagcctcctgaatagctgggactacaggctcgtgtcaccatgcctggcttcatgattctgttttatgtgaccaaactgaggccgagaaaggagtggtacttgcctgaggtcacaggcaggttgtgtaagaaggccgggcctaggatgaggcaagtgaggcatctaagtgcagcgtctcaggaggtgcccgctgtgtgcttgcacattgtggagaataagaacctttgtttttgagagagggtctagctgtgtcgcacaggttggagtgcagtggtgcaatctgggcttactgtagcctcaacctcctgggctcaggtgatcctcgcacctcagccctcccatataactgactataggcacacgccactacgctgtctaatttttgtaatttttttttgtagagaaggggttttgccatgttgcccaggctggtgttgaactcctggtctcaaactcctgggtcaacctgccttgagctcccaaagtgttgggatgacaggcgtgagccactgcacctggcagtgagcaccttctaaaaggctcctcgcgggcctcacctgagcctagtcctgggtgagttcctgatctaggactggaaccctggtctcctggccccatgaactgttctggacccctgcgaggtactttttagagtctcgctgaggcctcctattcctctttaaaaggagcctctgtgaagtaggtcacccagtgctttttgctccacgtttctgttctctagctgttgtctgtgtcctagagaaagccgggcccacttgcccccacctctccccaccttctgccccctccccctgccagctgcgcctccatgtaagtactttgagtcccttaacaccccaaggcgtgttggtggccagcttttgtcgtgatgacaagccccagcaagtctacagggactggctgctttcatgtgggccctcggtgaagcctccttggtctcagcaggccctgtgttgtacccaccaggcctctaggagattagggggcttctgtggctccagatggctcaaagcttttcccttcctctgtgttatccctagcccacctggcttccgtcctcactggccacggggcttgggggattttcagtctctccaaggctctggcatcttccagagtgggctagtcttggagtgtccatctgagccattctttctgtcaccactgctgggcctgcctgctgggccttaggtgacttcttgagaggtggccaaagctgctaatccctggaaggggctcctaggatttccctgtggctggcaggacccttggccacccacgtggtgtgacatgaggagcctggaaagccagcccaacctccatccttaagccccacgtataaacataccttttttttttttttaactgcagctctcagagcctgcagttctactgttgtcaggttgccttgtgctctccttggcatcctctaagaaggcaaataccttttcagctgggtgcttttaagcatttgctgtcaagaagcaagccctggccagcctggcccttttccagtgttctgtgtgaccgtggccaagttgcttctcttctctgggtctcgtctttgtaagacccttttcagctctagcactttgaggctccagcatggattcttacaccctccacacctttgccggtcacctttcttccttctctgcagggtggggcacagggaagggcctggcagctgagctgggtggggccaggggccaaaagccagcatcatagacacttttccctccagctgggcataccagtccttcctcttcttctcaggacaggtggggaaactgaggtctggagggggaagggccagggctggaaccaggacccagttatccttattgccagtgagtgctcctcctgctgttggctgctacctctcttgagagggtcagaagacccactagcatgagggtcagggacatgctttttcctttcccgtggaaggctcctccaggcagggcttgggtgaggcaggcgaggtgccagtggttccctgggcacggggcagaatcggaggaggacatcctctttctgaggttaaggaggtaggggctggaggccttgacaagggaggtggcatgaaggggcgtggaggtttctaggaacgtggttggtggcgcagggtgctctagggccacctccctcccttgcttctgccttccctttctcctggggaggggactgggccaacagtaatgccatttttcctggccctgggattaggtgcagccgtgttaaggagaggacattcgagagggcgtggcgaagtgaagaggaacctcacgccactgcctggagctccggtgggtctgggtctggtcattgtctcgctggctcctgtccactctgaccactgtccctggccccctgccctgtccagtccttccaggtccatctgagtgtgtgtgtgtgtgtgtgtgtgtgtgtgtccccaggagggatctgggggtacaggctggcacttgagcctggcactgggtcctgccttcattccagatcagaagcagctcccggaactgccccagggagaggtctaggctgacctggcagattcctgatggaggagaaggaggaggaggctgagggatgggaaggaagggctcagtttctcctgtggcttctccagacagctaggcatgtccacaaatccacctgaagccagcaggtccaagagtttaaagatttatttcagggccacgggggaagctgaaatggtgagatcccagggctctcagatgttgtgtttgtggctttggtcctgtctagactgtgagagccatggcttgtcaaagccagaggggcccctagagaatttccatgttcttaacttggcttttgatgggggccagtcacaaccactctgaatttgtgtgtctggggagagaatctgctaatagccatcattagattctcaaagggttctataacccccagaaggtcacagacttctcctctagtccatacccctcactgcagttgcagaaactgaggctcagagaagggaagggacttgcccagagactcacaggcggcaatggaggctgtggcaccccctgcctctgtcttcctgccagcattctgcctgaccttacaagctggggaagcttggctcattcaggggacaatgacctctcatcccctgatgagaggaaggggatgactgggagggaaggactgggaggctgttgtggtttccaggcccgcatggattttggcttctgcatccttgagatggaggcccctgagtctgcctgtgccttggaatctctcagggtgtatctgaggcctggagtcgggcatgcgggagggtgggggctagtggtgacccacatttcccagctcctctgcaggggaggcagataggggagaagctcagggtgtgataaaattgtttttacttcactgggcataaatgacaaataaatgaagtgagggttgggaagtgcttggtagagcgcctggcacatgccaggccgtgaggcgaggtgctcaccattgtcctttgcggtgccctgctagctgagatctcctgcttctgaccctcgctcctgcctcttccttagcatgaggcctctgcctggggcaggaggtggcccccctttctttattttttttgagatggagtttcgctcaggctagagtgcaatggcgccatctcggctcactgtaatctccgcctcccaggttcaagcgattctcctgcctcagcctctggagttgctgggattacaggcatgtgccacacacctggctaattttgtattgttagtagagatggggtttcaccgtgttagccaggatggtctcgatctcaggaccttgtgatctacccgcctcagcctcccaaagtgctgggattacaggcaggggccactgccccgagccgccatccccctttcttatattggggtgtctgatgggggcgtgaggaccctctggctgaagtcctgccttgctgggttccatggtgcacctctctgcagtgcaggctttcccaggaggctgaagctcagctagagaagctgggtcagcagccctgggcctggtcacctccaggaagcctctctcctgggctgcagacctggcttgggagtggtgtggaaagtaggactgcagaagggtaacgaacaggggctgtggggtgggctgggaggggcatcctagctccacctctgcccagctgtgtgacttcgagcggttgcttaccctctctgagcctccatttccttgtctgtaaagtgctcatagcagtgacacctctttcagggtgttaggattgagcgtgatggagcaggtaaggctcctggcacagccccacatgttcgcaggagcttaacgttggccgccagtaagggaggttatgatatgtgttgggatatgctgctttgttccttttgagtgtctgtgatctgagcctaaggaaaaaatagttctggatggatttgactctgtcataggcagatttggggatagggtgggcagagagccccattttgggaagatttgtggccactgcataacattctgtgtgatggacctgacagccttggtgtgcgtgaagagcctcagtgggactgtcaggactgtcccgtccttgggacgggagggtggcaggtgacctgccgtgttccccacacagccccacccccaggctgtctggtatgtttgctcggtaagccctttttttcagagctggtacaaaggtaaactcgcaactcaggccctgttggaagaaggacacattctcaacaagtgaggtctaagttcctgaggttttctgttgggccttccctgccagggaacccagaacagattcacaagttgagaaccagggagtgaaccagtagtgcttaatgctttgtttccttgttgattgacggatgatctgtgagctacttccaagaaagatcactagaggctgcttgtgatactaaaacacatataaaatggatgaaaacaaacacagacagaaaactattgaaaaggaatggagaaagggatgtgcagggcatctggcaaatgttagctgtcttaggtgatcacagaggggctgcggagatgggggatgaggggcccaggctctggagcccagcagctgtgtgctgaagttcccattcacccccttattagctctgtgggctgcagcaagtgactggcctctttggacctcagtttctcatccgtataatggggggaatctaggtcatggtgctgtggtaaggttgaaataatggcatgtaacgcagacatggcatgtctcataaatggaagttaatgttattaatgcatttagcttggagatgccgcgtagcagattcacagaggggaaggtaattggcaagggcacaaggctcttgagtacctgctgtgggtaggagatggcttgtgccttggaaagctttcagtgaagttgggagccccatgttctagttgcaagaacaactgatacctggtgttgcgtggtgggatgtggagcaggggagctcaatcaggactttagaaatccagagcaggcttgttcacctccctgctgaggctggcattggaggaggagggacagggttttaatggacaagaaaatggaccaaggtaaatgagagtggggcacaccagacggcacaagccaggaggtcctttcctctctctgggtctcagtgtccccaggggcttactgcagggtagactgtgctctctgtggccctgcgactctgagccagacctccaacagtctctttcccggtggtggtggtcctggactctggggtgactgacaggcggcagcttggctcctggccaggcagcactgtgggggtgatgggggatggggcatgtagcagattccagcagaggaagggatttgcttctggtctcggcctcccagggatgtaatcacgctggagaaactcccgcacagctgggaagcaaatgtggaggattttccttgctgagctggatgtggtgggtggggcaggctgtggtagggtggctggtggagctgggaagctgtggggtgtggctgggtgggggtgatgatgtgactgtgctgggggtgtgactggctgggaggggctggatcagctatggggagtggccctgggtgcatgtggggctacctgttccccaggcctgcagccactgctacgccctcccctgctcaggtccctgcccaagtccaggtacccacccattcacatccttctgaggttgctggcagagctctttctgcactgacctcctctcagcccccaccccatgtgcatgtggcccagatgcctatgatgatgccatttgagcctgtcatgtgcatgtgaatgtggtgtgtgtgttgggggggcagggagcagtgtgtggtccacagagggcattgtcaagagtgacctaggctggaaataaaatgtgggctgggtgagcattcaaggccctgggcaccttcccccattcactgcagccatgtcgtaccagagacataaaaccttgggttccagagacctctagaaacccttgtggaaaggtcatggtcgccactgcattttcagtgcctagtggcatgcttggcacctagtggtgctcagtaaatacaggatgaggaaacaggtcgtttgcttgttccgcactcccagaaagatctcgaacctccttcctggatcccattctcttgctccttccctctggcgtcagcctggcctcccttcctctctctttctcaattcactactaatttgatatgtggccttgggccagttccttcctgagcctcactttccaaatctgttactgagtaatcattttattagcttatattaccatgtgccaggcactgagctcagtgttttacatgcctcatctctctttgtcttggtagctgccctgcaagatagataagtagtataaaccccattttagatttagtgaaactgaggttcagagaggttgagagatttgctcaaaggtcatgaggctggtaaataatggagccaacattcaagccccagctgggagccactgcacccgggaattacctgtaatcccagcactttgggaagccaaggcaggaggattgcttgagaccaggagttcaagaccagcctaggcaacatagggataccttgtctgtattaaaaaattagctgggcatggtggcacacacctgtggtcctagctgcttgggagactgaggtaggaggatcacttgagcgtgggaagttgaggctgcagtaagtgtgattgtgcccctgcactccagcctgggcaacagagaaagacactgtctcaaaaaatgaaaatatgctgggcacagtggctcacgtctataatcccagcactttgggaggccgaggcaggtggatcacttgaggtcaggagttcgagaccagcctgggcaacatggcgaaaccccgtctctactaaaaatacaaaaattagctgggcatggtggcaggtgcctgtaatccccactactcaggaggctgaggctcgaaaatcgctcgaagcttgaacccaggaggggaaggctggagtgatcctgggcaacagagcaagactcttaaaaaaagaaagaaaagattcaaagattcaagctcaggcaggctagctccagtctcggcctttaactgttatgctagctgtcaccactagagtgaaatagaagggtgtgcacagcccttctaaggaggcctgctggcgcacagtaggcatggtgtacatgtgagttgggttactgggcacaattcaccatgaaaggcatggcttgctcagtctccatacctgcttttatggagctcttggtctcattcctggagcccacccattcatcacaggcccaagccggacccccttccctggtcccagtctctggacagcttgctcctgtaagaaggcccttgtacctctgccccttttctcttatgggtccggggcagcattttcaggtggggatgttagatagagtgacttcaactccagagcagtggccacggttaccgtggtatttcccgaaagtgcagcgttgccatggcgtctccatgacgaccagagcatctcattcattatcctcagcaccttggcagggaaagctgggactagggctaggggagtgcagtgggagcctggctgagggctgtgggccactggcctttgtggctgaggttcccctcatgcccctgcctaccccaagccaaggttcctctgcaggctctggagttatctcccacccatgggttctgggttcacatttcagctctgccactgaacagttgtgtgatgttgggcaagtgacaacctctctgagccttattttactcaactgtaaatgtggataacaatattagttgtaaggattacatgaaatgaggtataaaaagtgctggctgggcgtggtggctcacgcctgtaatcctagcactttgggaagccgaagtgggtggatcatcggaggtcaggagttcaagaccagcctggccaacatggcaaaaccgcatatctacaaaaattagccgggaatgatggtgggtgcttgtaatcccagctactcgggaggctgaggtgggaaaattgcttgaacctgggaggcggaggttgcagtgagccaagatagtgccattgcactccagcctgggtgacagagtgagactccgtctcaaaaaaaaaaaaaaaaaaaaaagtgcttagcacagtgccaggctcatagtatggcagtattcataatgatgataattataatgttgttggtgttatttttattgtaggaacccttgggtttcagggaggaatgaaagaccaaactcaaagtcaggaaggaaacccatttgagtcaagatttggtggtttccatgtgactgtggcaagtcacttcaccttgaagtctttgtctccttatctgtaaattggaaataataacagctgctcattcattcatatcctgagtattcaataaggacctgaccctgggaaaagtgggagcttccacgatgaatcagacttggttcctgcccttgagtggcacccgggcactgggggaggaggaagaaaggacactgttttgtgctgagggctgtgtgtgccgggtgctggtgagggcctgtgcagaggtcagtaagccctggtcctgccccacagatctgcaggctacaggaggtagagccatgtgcaggaatgcccccagtttactctgcacagaccacatgctcaggtgcacccaggggctgggcaggaagccagatgaaggaaagaggttggctgtgagactgtacatagagatgctgatggtgttaactgcaggatacacagcccatttgaggctggcactctaagtgcctcagctgatggtggcaggtgaggatgtgtgcccagtgtcaccagaacttgccctctttagagacaagttagaagttctgacttttatataaaatctcctgatttaaaaatgttgctaacgaatcccaaattaaagaaaaatactgtgcaagccaaagagcacagtctgcattttgtttgggctccagggtcctggttttcagcctctgcaccgtggagtggggatgaggcgggagcctgaggaatgagacttaggagtgggagagggggcagtggttggtgatgacttcagaggggtcatgactttggaacctggatcttgaaagatgagtaagtgtcccaaggggtccggggaggcattccaggcaatgggaatttcatcagcaaaagcctcaatgcttccccgagattggtgactggctgggtgaggctggaatttaggggaaactgctggtgatgtctgcaaggcccagcaggcccagggtggtgggggtcattgaggcctcagccccagctgtccttgaggccttggtggctgcagggggactagaagcccctcagttacttacctcttgagccacgggagttctggagtgcaggcgggtgaggagggccttgggtggagggtggcagcctctgagtgggttgcagaggggctgtgctggaagccccctttgccagccggctgagtggctggcactttgctacaaagcaactggcttccccccacccacccccaccccagggtatttggccttctctgaggacaggggctaccttgctctccctctgccctgggttttgccatggccttatcttcagcttcttggcttctatccaggcagccagccagctcccagtaagggccacagcctccaaagatagggctacttttcagacatgctgtgagaggaggacggcagccctggctgcctggccctctgtgtaataagtgtgtgtggtgcctgcctgcctcagcccttgctctccctctgtgaaatgagctgccctcccctgcctgagtcctggggctgtcagactctcaagagagggatgagcttgaaagtgcttcgtgagctaagctgtgatccacatcgtgagggattgtcataagtatgttaaataagcaacaggggtgcgtgataacagcagctgtgtgccaggcgtggttctgagcatcttatgtatcaactcatttaatgttcacaaccttgggaagtaggtagaatttccattttacatgctaggaaactgaggcactgagaagttaaataacttgcccaagattacatagctactaaatggtggagcttagttttgaatcgaagccacttggctccagtctgcacgtgtaaccagtagggtccatcaatctaggactttaggtctgtggatgggtggcagggaggctctgaactccttgaaattattatgatatatatttttttgagacagagtctcgctctattgcccaggctggagtacggtgatgtgatctcaccttactgcagcctctgcctcctgggttcaagtgattctcttgcctcagcctcccgagtagctggaattacaggtgcctgctaccatgcctagctaatttttgtatttttagtggagatggggtttcaccatgttggtcaggccggtcttgaactcctgaccttaagtgatctgcccacctcggcctcccaaagtgctgggatgacaggcgtgagccaccacaccattatgacattttctagtgtgtgtgtgtgtgtgtgtgtgtgtgtgtgtgtgtgtgtgtatggctttattgtttagatttttagttttacattcacagcaaaattgaaaggaagatacagatatttcccatatgccttcttcccctgcacacacacacagcttcccccattatcaacatcccccaccacagtggtacttttcttttttttgagatggggtctcgctctgtcgctcaggctggaatgcagtggcacaattatggccactgtagccttgacctcaggggcccaagtgatcctcctgagtagctgggtctacaggcacatgccctgacacctggctcatttttttttttttttgtagagatgggggtcttgctatattgcccaggctggtcttgaactcctggccttaagtgatcctcctgcctcgacctcccagggtcaggggactgcaggtgtgagccactgtgcccaacccagagtggtaaatttgttgcaacagatgaccctgcattgacacatccttatcacccagagtccatagtttactttcgggttcacctctggtagtatgcattctgtgggtttggacaaatgtataatgacatgtatctaccatcgtcgtctcatacacagtagtttcactgccaaaaaaattttctttgctccgctgattcatactctcaacccccaacctctggcaaccgtgtgcatttttttaatgcgcatattttttatgtctgaaaaatgtcagattcccacagggtttcgtggctcccacattcctgagactctgagctgcatcattcacactctgaaagattgttaatctgatagagggtcactgaccacagcactcaagcctgcgaggagtggctggtggctgctctcctccgcttccatgggattgggtggccaacgtgggcagggcgccatcagggcatccccacctcctatccactgtgcttctgtcctggccctaggccaaggggtggggctgggctgcggccacaggctgcccttatcaatggtaaatgggacacctgggtaccctgagtgtaaacaggaccagtcaccccagccttcctggctctgcccaggacacctgctccttcttgccctgctctcagctagaattgcagggagtccctggaaagtgccacacatgctcttatctccaagctgtggtatgtgccatttcctctgtctacccctgcccaacccttactttttcttctggtcagcttaggtacccttcctccaggaagccttccctgtcccctccttccccctgccagaagagttaaggacccctgagctctcccaaacccccatcccatccccgtctgtcacacttatccccctgcattgcagatgcctattttcttggctgcctctggttcctcagggtactggcactgaaatgtagaatatcagaggtgaaggagcccccggagatcacctgccccaacccccttgtaacatgcaggaagcccagagggagccacacagtgcatcatggcagagctgagaccagacctgttgtcccagtcacctcctcatttcacaaacaaaaagcggaaataaaaatcacccagagataatcactgttaatgtttctttttttgcatttagcaccagtttctagcctatgcacaaaaatatttaactaaattatgaccgcacgtacaaactgttttataaatgtttttgactttgacaatacatacggtaattatatttctatgtcagtacatgtccttctccaacatattgtaaatggctgcctaggatttcatcatatgcttgtattataattgcttttttttttttagatagagtctcgctctgtcgcccaggctgcagtgcagtgacgtgatctcggctcactgcaccctccgcctcccaggttcaagtgattcccctgcctcagcctcctgggtagctgggactacaggtgtgtgtcaccacgcccgactagtttttgtatttttagtagagatgaggtctcaccatgttgcccaggctggtcttgaactcctgacctcaagtgatccacccacctcggcctcccaaagttctgggattacaagcatgagccaccacgcccgacccttgtgttataattcctaaatacaatctcccattgtttgggatttgctgttataagcagcactaggatttgtgttcttgtggaaaaatctttacacacttctgcagtaatacctctaggataaattcctggaagtgcagctgtcgggtctggagcatgctgtacccatgctgagcacatcatatagtcttggagctggaagggatttcaaagatctttaccctctaggctgggcccaagccttgaattcccccctggcctctttagccctggctcttacaccttccatctagacctgggcaactctccttctagctttgagctgctgtgactgatagttgctccttgggggccaggcgtggtggttcatgcctataatcccagcactttgggaggccaaggccggcgaatcacctgaggtcaggagttcaaggccagcctgatcaacatggagaaaccccatctctactggcatggtggctcatgcctgtaatcccagctacccaggaggctgaggcaggagaatcacttaaactggggaggcggaggtggcagcgagccgagattgcaccattgtctagcctgggcaacaagagtgaaactccgcctcaaaaaaaaaaagtaagaagaaaagaaagttgctccttgggttgctgggaaatctcacttcttgtgacttcattactatttaagggagactggtagactgtgtttggggttgctgtttgggatgagacaattggggcctttgtgtcgtgtatgtacgtcttcgttaactctttccagtgagatgagtataggaggcgtggcctgggtgcaggcggtgcggggggttcaggctgagggggaggctggaacccagagttatggctgcctgggtggacagaaggtccagggcgggggaggcctcccctctgcatcctgtggtggcagtatggcgatcctcaggaaggctatttggtcatctgttgtcctgggctgctgtgtgcacctgtgggtacgtaccccgaggatgagagatacctggttgcattatgggcaaatatgacagctgccatgtttcttgtgccaagctcctcagacatatttacttaacgctcagctacagccatgagctacaggggtgctggtgttacagattagctcactgatgctttaaaggtgtaatggtcacctgaggccttctcacacagctaaggcacacatgccctgcagcctgctaatgaatcctggcttggcttcattctgagtcttcagaatgaaaagactgatggagactcagtcttttcatctatcatatggggctgctgggctcattcaaagagagcaacgggttaggaagggaatggaatatggtgaggatgtggtattcagtcgtgatttagaattctacctctagttcccaggctgtgcaaatgtttatcatctctccccatccgtcctgctcctggatttttcttggcctagtcttggactctgataatgatcaaaaatagcaactccaatttgtagataccatatgctaggtactgctttaagtcgtttacaaacgttgttggacttaatcctccaaccccttatgagatgggttcatattatttattgtctgccccattttacaagtagggaaactggggctcagagatattaaagagcttgctccaaatcatgcaaccttggttcggcagccgtacttgcatttgggcattcctaggtcagctcctgtgtgtccacagttagctgaaccctgaagcccgcactctgacgctcctgttctctccactctccacagccttagccccgtgggccccacggagtgagcggcatgcagcacccccgggcctgtccagtgtcctctggcctgctgccctgcacccccagaaggccctgacgccctggggcacttctgctctgcacaggaccacgcgggggtttgccatggtgacataaaggggcgcggaggaaggaaggagcgtgaccagcctgtggactgcgcccctggctgggaggaaggactgggggcccagatcctccactcccagtgccccacaagggcgtcgcttcctaagtctctgtgaatttgttggtcagtggacgattctcgtgtctcctcctgtgtggggccttggggtagccagggcaggccgggcctccggtggccaaggtctcggaggccaggatgcctgccctggcatgcctccggaggctgtgtcggcacgtgtccccgcaggctgtccttttcctgctgttcatcttctgcctgttcagcgttttcatctcggcctactacctatatggctggaagcgaggcctggagccctcggcggatgcccccgagcctgactgcggggacccgccgcctgtggcccccagtcgcctgctgccactcaagcctgtgcaggcagccaccccttcccgcacagacccgttggtgctggtctttgtggagagcctctactcgcaactgggccaggaggtggtggccatcctggagtccagccgcttcaaataccgcacagagattgcgccgggcaagggtgacatgcccacgctcactgacaagggccgtggccgcttcgccctcatcatctatgagaacatcctcaagtatgtcaacctggacgcctggaaccgggagctgctggacaagtactgtgtggcctacggcgtgggcatcattggcttcttcaaggtacacaagaagcagggtccccgagcagttcagagccccctctgcagctcagtgcctgaattctcatttgtgaaataggtgtaatggtagcacccgcctcctggggttgttgggagggttaaatgagtgagtatatgtaaagcactgggagcatgcggtgcccactgcctggcaagtgctttgtaagtattaggggagcgtgccagggggatcgcctgctgtgcgtggggtccagcacacagcaggtgcttgcctaaaggaggccacagagtaagtgtgaagtcagaggagcatgctctgctaggtgccccaaaatctgtcaaggcaatctcccctagggagggcgtgtgcacccatttttcagatgagcaaaccaaggctccgggtgttaagttacttatgtgaggttttgcagcctgtaagtggagaagccgagatttgaacctagacatagacagtttgggctctctatcccatgctcttccctcttggtggtggtggagtatggcgttaatatacctcctgacccagagccattttgcatgaggagaaagaggagaatgaaatcccactggcagatggggagctgctctgggctttatggggcttccagaatgaccgccgggattggggtccttgcaggaagggtgtcccagagaatctgtccttggcggggggaggttgggaatggtgggcgggggatccagaggctgtggtcagagaagtctgacctgcaagatgaaagcagacactagctgggactcttagttggatgctttggaggtggcagggaatttgttccttcattcaacaaatatttactgagcactcacagtgtttgtggtcctgtgctagcggtgatcgaagtggacaaagtccctgctgtcatggagctggcatttcagtgctttgggagtgggtgggtgacaggcagtgagcaaataaacacaggatggggcaggtgtgatcagtacaaaaagaaacaaagcagggaaaggacacagagggtagtgggggtgggagcttgacattattttaggaaagtcgtctttgataaagtgacctgaaataaatgaggggaggagccatgtggctttctgtgcaaagagtcttccaggaagaagggacgttaagtgcacgagtcctaaagcagcctcttgcttggtgtgagccaggagaggaggagcgggagatgggtcagaagtggcctgtgtccgctgctgggtgcccgtttgtgccaggccttcctggtgcacttgcgcactgggccctgtctcctggagggcttctcatggcgtgttctttcacaccctaatacagcaggaagctctgccactgaaaggtattgtgagccaagaatttgaaggcccttagaagtcctgcagtagagcaaccagtgagatttgttctcaactggcttgatcacaaaaccctttcttttacagagcaccctcaggggaacgctggcctggtttatggctttacaatgacatcaagtcagattatctccattgtctggttgtctcttttctcttggactctgtaccctttcctgccatgaacttcgttaagttctattcagagtcccaggcctgaaaagcgtcaagaggctgacgtttattgagtgctcactcagtgccatgcaccgtctacatgcgttgtgcagattcacgcacttcacacgaaggcaggtggctagcagcctgatttaagataggaggaaactgaggcaaaggaggataagcaatgtgtccaagcctacgcctctgatgagtataggtctgggatttgaactcaagcagtccggccccagaggccttagtcttaaccacgatgtgatgagtccaggagcctcacataccacttattcaggagaagtgacatcagaggccacacccagtgcacagagctcccacagtctttggggaccaggcggtgggctgtggccattgggcgtaattggtacaatggagcttgggcgctgtctggccccaattccttgctctgcagaaggtaaacaggaggcctagggaggggtgcgggcatgttcagagtctcatcgtggggccagtggtaattccaggacttggtgctcttcctaccctgttgcctaggacaagactatccttggttttgagcagaggcctgtgattttctgctcaaatgcatgccctctggtggtcaaggcacatctttccactctttctgcaagaccaacttccccgctgtgtgctgggcttgccaagtggggattgtctgtgggctccagggatctgaaaactcattttccagttcccactgatgctggattcccagggcagtgtgagagcagggacttaaaagtccagacaggttcaaatctctctgtcatttagaaacagagtgacttgggtaaaatgctcaactcatctgcaaagtggggctaattacagctgctgcctcactggtctgtgttgaaaacaagacagtgggtggggagcactgagcccattgcctggtaccggagccactcaatagatggtagctatcgtgctttgtcatctccaggttcagtaaacagcagtggtagcactgtgtccgtcttgtggccctgaccaatgtgtgcccctgtgagatcctggagggtggtgggaatagggtcatcctcatctggatccctacttcctggcactgtcgtgcctcaaccttgaaattccaggtgacctggggctaaacacaccctggcaggggtctggcaaggagtacctgacctctttcattgagcacttactgtgtcccagtcactgagctcggtgctttgcaggcatttcatggctaattctcacagctatcctgtgaagtaggcactttattttcagataaggacctgaggttcaaaaagttaaatggcttgtcccgaatgacatagctacaggttgagtgtcccttgtctgaaatgctggggaccgtaagtgtctcagattttggaatgcttgcattctacttaccagttgagcatccctagtctgaaaatctgaaatccagaatgctgcaataagcatttcctttgagcatgacctttagaggtcacattggtgctcaaaaagttttggattttggagcattttggattttcagattagagatgctcaacctgtggtaagtcatagagccaagatctgacagtcaagcttgttgtttctaacccagccacaggagcaaatgtgctgacagggagcctgaggctcagagaggagatgtaggattcccaaggtcccccaggtaatggtgaggtctgtgcttggcctccacctctgcgttcccgaatcagggctcctcctccctctgcctgggggaccccattggaagacttggtgtctccggagtgggtactcagtggtgaggagcaagagggatttccactgctgtggggtgaggcctgcagtgaggccagcctctcggtgctgaggccctctattcccttcttgcctggttcatttcattgccaatggataggccatcagtgacttggcttcctcccttcctggatggctgggcagctgactgagcctccagcacctggcagtcagctcagggtcgggactttgaaatgggatccctcagcacccgcggtccagtgtggcatcccaggcctcagcaggcgatggacaaggcctgaaatgtctctggcccctaccgcttttgtccccacacagcccaagtagttcccagccttggtcagggctgtcttaggagtcgtgagcagcctggagttggggaggtagctgaggactggtctgtgcgctgggcctcagcaccccaggctggctcaggacagggtggggaggtactcttgatgtttggagaatcacatgcaggctacttaatgtggtttacaaggccagggccctgcagagcctttttgggaattagaggagatgagtgaaaggcgctcttctggacaggtacagctctgcaacgggcacaggctcagctgagactttaccctgcccccgccactgacctgcgcacccctgtgtgtgctccctgagcagctctcctgggggccccacacatgaccccatctccccctccaaactcattttgctttgccctgccccactcactctccaggcagcagccacatggatctttttaaaatgcaaattagaacctgtcatcctttgatggagtctttgagggcttcctgctgctgcttcaatcctccagcaccctgcaggcctggctccagctgacctatctgcctcatctcctcctttccctcttggtcactctgctgtcttcttgctattccttggtcatgctgaggcctgtcctacctcagggcctttgcacttgctattcttggcctctacctttccctttgtttgtgcttgtttgttctttaaatgttagctcaaaagtccctttctccaggagacctcctgagcccactaactgtgcccagtaatctactgttccacaaatatgaacctcctctgtgtagcatgtgccacactgaagttttatatttattcctgtgatttcagtgaatgtctctcttccctccttgattttaaggttcatgagagcaggggccatgtctttgtttttctcactgtatcactggcacttaaaacagtgcctgacacagcaaatagttgtggaatgaacagatgaaacctgtattgagcgtctatctatgccaggtactagagagctggctgttcctcttttattccttttaaaaatccagttctgcattgaattgtgtgtgttcctgctgggtatcaagctgggcactaggggtccaaaggcgaaacatcatagcccctaaccttaaggggttgcaggctggtgggagatagaacgctgaaaatataatattgcagctgaggtgagaaatgctgcagctgaggctttaacatggtctcagggaggccagtgcagagaagagggtatatgcattgggtgtgaattatgagcaggagtttgtcaggccaagaagacggaatggaattggcacaggaacaaggacaaattgtaccatattcaggggcaggtggctgagagggtgaggaaggtcatgaaggaacaggggctgtgagcctaaggaagaggggactggggcacactgtcttcagacttccagggagctgagcagccacatgccttgagagaagggaggcagagacttcaccactgatggcagtgaccgggcaggcaccatagtgagggagtggcctctggggtgctaggggcatatggggcacccccagcagaaacctcctctttgaacatctgcattggcatccacataagatgtctcctgaagaaaaggttgcgtggccagaggcagtttggaaaccccaggcaaccacgcctaatggttaggtgtgtgggtgctagggctcgacctcttggcagcgattcatagctcctcccaaccactgtgctactgagggcagcatgcccctccaagcctcggttttcacacctgtgaagtgggatacgcaggctgatgtgaggactgaatgagcagtttctggtcatgccacaggccctattctgagcacgttgccggtattgatactgatcatcctctaccactcctggagttactttctgttcttagccacattttacagcagaaactgaggcacagagaggtgatataacttgcccaaagtcaggcagtctagcaggattcatgttctcaactgctagattttcttctatgtggtttagcctctctaggcctccgtctgctatgtgtaaaatgggtatgagagcagtgtctccatctggggtcattggaggattaacagcattcctgtctgcaaagtgcacagcacctagtgcctggctttggtaagtgagtcgtgtgtttgtgagtatattattgtgcagggtggagcgcagggccagggtggtgagccctccatgaatgttggtgaatattgataccactgttatggtccacatgtgagagactgtgtcctttggggttctggatgtgacagttctgttccccttcctgccctccattgactgcaggccaatgagaacagcctgctgagtgcgcagctcaagggcttccccctgttcctgcactcaaacctgggcctgaaggactgcagcatcaaccccaagtccccgctgctctacgtgacgcgacctagcgaggtggagaaaggtgtgctccccggcgaggactggacggttttccagtcaaatcactccacctatgagccagtgctgctggccaagacgcgctcgtctgagtccatcccacacctgggcgcagacgccggcctgcatgctgcactgcacgccactgtggtccaggacctgggcctgcacgacggcatccagcgcgtgctgtttggcaacaacctgaacttctggctgcacaagcttgtcttcgtggatgccgtggccttcctcacggggaagcgcctctccctgccattggaccgctacatcctggtggacattgatgacatcttcgtgggcaaggagggcacacgcatgaaggtggaggacgtgaaggtatggccgggggtgctagaccgggcaaggcaggtggggcctggcaagcttcagccttcaggtgccccatcgtgggtgtgccctgtctgcatctcccctatgctgggagttacttaaaagacagtcccactctgcttcctgtcctgccagttggttcttattaattgtcttattagaagcaagtatcatttaaaacttgattgaagcattggccaggtgtggtggctcacacctgtaatcccagcactttgggaggctgaggtaggcggatcacttgaggtcaggagtttgagaccagcctggccaacacagcgaaaccccatctctactaaaaatacaaaaaaaaattagccaggtgtggtggcgtatgcctgtcatcctggctacacaggaggctgaggcaggagaatcgcttgaacccaggaggtggaggttgcagtgagccgagattgtgccactgcactccagcctgggtgacagagcaagactctgtctcaaaaaaattaaaaaaataaaactttattgtattgaagtattgaatatgaggaattttgcatctggaatgtggagtttaagtttgtataatatgtatggaagaagacatccagacaaagatgggagctgtacaatgctgtttgtctgcctttaatttaaatatgatttttaactcttaaaaatgtttatgttaatgtcagagcgcctacaaaactcttaaaataaggatgagagcttgaatcatgcatgaggcagattttaactgaggtgtaagtagacagtggaatgcatgtgtttaattcaaaaaaggtttgctggccgggtgtggtggcttgtgcttgtaatcccagcactttgagaagccaagggaggaggattgcttgagcccaggagtttgagaccagcttgagcaacataaggagaccttgtctctacaaaaaataaaacattagctgggtgtggtggtagtagtcctgtagtcctagctatctgggaggctgaggcaggaggattgcttgagcttgggaggttgaggctgcagtgagccatgactgtgcatggcattccagcctgggccacagagcaagaccctgtctcaaaaaaaaaaaaaaaaaaaaaaagtttttactaaacaaaactgtgtaaaagtactttgcagaccacaagattttacacacatgtgaactgtcattgtgagaaacagcctacaaattaagaccattaaacaatctttaaaatacagttttcatctactcactattttatttaaacttattcgcaaaggagatggcatcctagtgtaaataggaaatccggatcagttgccataaatagagggcaaccataacaataaatccaatgaaaacaaaacagggggattaaattctagagacattctgctgcctgctgacagcctgtcctctcttataggagattagcaagtgttagaaacatattagcaccaaacccaggcttgtctttgatgttagcaggaggctttaaaaagagacttgtaagaggaattctgaaatctctggtaggggttggccctggggcctggaaggagggtcctggtggcattcatcgccctgccttggtcaggagtgaactttgctcttccttacacctctagagaagagcagaatggatgacattcgggagcaggcactgtctggggagttaagacctaatttgaatcgagtcctaatttgaccctaatgaactaggtgacttgggcaggtcccctcccatgcctgagcctcagctataaaatgatgaaatggggtgaatgggaagttttcaggctatttcctggtgcccaggggtctcccataggtgcctggatagctggggtgggggttagggggatgttttggtgccaggctcagccctccaggctccaccttagttgctccagcggtgctgctttgcgctgcttttacgcattgtgtttcctcctgaaattccattctcttaaaggctctcctgtttaaagaacgttttagccttccagtctaagtcttcatgcagtgccaccacctgcctctggcaaggtagattgctctgtgttctactcgaggtgttcttccagtggcccaagctcattttctcctgcaggaacccaggttcttgctgtctgtccagtgagttctggagagactgtggtccagggtcaggttgagcctgaggagatcaggttcctgggctcactgtgttcctataagccctgaatttctctctcttattaattttccgtattttaaattttttttttttttttttttttttgagatagagtcttactctgccacccaggctggagtgcagtggcgggatcacagctcacttaagtgatcctaagcacaagcaatcctcccacctcagcctcctgagtagctgggatcacaggcacatgccaccatacccagcttacccagctagttttttgtagagcccaggttttgccatattgcccaggccgatctggaactcctggagtcaagtgctgcacccaccttggcctcccaaagtgctgggtttatgagcatgagccaccgcacctggccctattttttctatttttaaagtgaaaggaatgatagcagtttgaagccatttctatagaacaatagaaatagaaaaataggatacaaaccaaaaatacaaatagaggcaccctctttcacacactcagctcagtccagattgcaaagtgcttctccagccacaatcctacttgccttaaacatttttgtgaataagaaagggcagagttttttttttttctttaatcccaagcacagcctacaacagagcccttctttcagagacatgaatgtcgcctcattagcttgtacagtactggctgtacagcgcaatttaaataataccaatagcagctgcctattcagggcttggtgagtccttgtgcttagccctttctggccgttgcttcattgggtccttacagcagccctgtgaggtgggtattgttctgagtcccatttaacagaggtgggcactgaggctcagggagttgaggtaacttgcccaaggccacacagctggagcatgcacgtccaccaggcggtgcacggccctggtaagatgctgatggtgactacattgcctggggagggccaggacttttagtttgtaaagtgttctgatagctggctcttacaggtttcttttttctttttctctctttttttttttttttttgagatggagtttcattcttgttgcccaggctggagtgcagtgacgttatctcggctcctgcaacctccgcctcctgggttcaagcaattcttctgcctcagcctcccgaatagctgggattacaggcgcctgccaccacacctggctaattttgtatttttagtagagacagggtttcaccatgttggtcaggctggttttgaactcctgacctcaggtgatctgcctgcctcagcctcccagggtgctgggattacaggcatgagccactgcacctggcggctcttacaggtttctgagctgctttgtggctcgtgtgtcctaaccccagagtacacctgtgtgtttgtttcacaagtgtcagtgtcccctcattgactcgaagagtactgggtgcacggtgcgcgggaagaccgcattgctgggcacacagtgtcccatccttggaaagggtatggccctttaaagtcagcactgcattccatcagcaaagagaaatcctccacatttgatagatgaagacacaggcttacagcggcagtgaccacagacgtagcattggccaccatttttcatcacttaccagatgtgaggcagttttacgtacaatatcttttttacaattgtttaatctttttagagcagggtcttacagttggacctgtgttggattctaactgctgggctcaagcaatcctcctgccttagcctcccgaatagctggcatacatgcggttatcttacttgattcttccaagagccttatgagggagatattatcatccctgttttacatttgatgaaaccaaggcctagaggaatgtgaagccttttcaaggacacatagcagagctgggtaggattctagattttcccttgccagaggcctggcggacggcagcatagggctggtttcaagagtatgtgatctgtgcagccacacagagccccacgctcagagggagcccattatgtggtttaatgcctgctgttgccttcttgacattcttttttttttgagacggaatctcgctctgtcacccaggctggagtgatcttggctccagtggtgcgatctcggctcactgcacctccgcctcccgggttcaagcgattctcctgcctcagcttcccaagtagctgggattacaggctcgtgccaccatgcccggctaatttttgtatttccagtagagactgggttttgccatgttggccaggctggtcttgaactcctgacctcaagtgatccacccacctcagcttcccaaactgctgggattacaggcatgagccaccacgccgtccttgacattctttataatttttgaacaagggatttccacgttttttcactgccctcagtgggaaaagcagggagctcctggctttccctcactcattcctttctcccctgcctgtcctaggccctgtttgacacacagaacgaactacgcgcacacatcccaaacttcaccttcaacctgggctactcagggaaattcttccacacaggtaagtgggcctgcccctgccctcactagcaacttccaggactcctcagcacccaaaccctcaaagcacccatccatgagggcagcgggtgggtttactggcccacattagaggcagaggtgacccctctgcccccgtggagccaacagcctacaagagcagtcacaacccaggcagaggccatctggggacaacagcagcggcagcaacagcagccgcttgtccctccctgtcctttcgggctgagctggcctgggtggggcatcttctccctcttgcctctccctcctatcttttacaattatgtgtattatttctgcttataaaagaagctggttgagttttaagaacattacagaaacatgtagcatagaaagtgaagatgccctgtaattgtacccaccttggatgaccagtgtcatgggtttattttagagtcctaagggttgagggtgagggctataggttgcttggtgcgcactttccttcctctttggggctctctcacttgctgtcctctcttcatctgctgtccttcagggactgggcagaacccctcagctggtcatctgcagtgaccattccccctagctgccttctgcccaggcctcagtgagacaacctctcttgaattctaagaaaaccatttattcaataattcagcagatggaggggtatatgcaacatagccccaaagccaaataggagtgatcctgggttgtctgtctgtattttttatattctttttaaaattttttatatatttttggctgggcgctgtggctcacgcctgtaatcccagcactttgggagggtgaggtgggcatattatttgaggtcaggagttcaggactaccttggtcaacatggcaaaaccccatctctacaaaaaatagaaaaaatagcccggcgtggtggtgtgctcctgtagtatcagctacttgggaggctaagtcaggaggattgcttgatcccaggagttcaaggctgcagtgagctatgatcgcacaactgtactcctgcctgggtgacagagtaagactccatctcaaaacaaaaagaaaaaaaattatttatttttagagacgggacctctctctgtcacccaggcaggagtacagtggtgcaatcacagcttactgcagccttgaactcctgggatcaagcaatcctcctgccttagcctcccaagtagcaggtactacaggtgcatgccactatgcctggctattaatattttaaaaatttttgtagagatggggccttgcactatgttgcctaggctggtctcaaacctctaggctcaaacgatcctcccaccttggccttccaaagtgctggggtttcaagtgtgaaccactgcacctggttgttttttatattcataacccttagcatatcagaggtggttatagtaatatgtctgagatagagggtcaaacatcctgtatatatacaaagagcttccatagataattagataaaagacaagtgacctgatttggatcattggaatagaatcagagcaggtatgtcagaggtagaagaaacccttgagatcattgactccagaccctgaattgtgcagatggtcccaaggatctagagagcagatagtcttggccaaggtcccccactgagtcaagggcacactctagactagaattcagggctctgggctggggctctgtctgctcctgtgctgtagcccagataactcttccaggcagctcctgggtgggctctggccatgctctcccatccccaggcacaggcccaggttagagggcctcatggcccagtgggtggttctgagctgcctgtgttgctgcaggtaccaatgctgaggacgctggggatgatctgctgctgtcgtatgtgaaggagttctggtggttcccccacatgtggagccacatgcagccccaccttttccacaaccagtccgtgttggccgagcagatggccttgaacaagaagttcgctgtcgtgagtaagattccttgcagggcagagcggggcgggctaagggctgggctggaggtccagactgctggcctcttgctgcttttgcagtctgctctgacggatttttactaacacctctgggccagggccaagggagagctgcctttatagccactgtctccttgaagccccaagagaataacccctttacagacaagaaaccaaggctcagggaggtcacaccagctactaagaggtccagctgggacttaaactcaggccatttgtttcctgtgcccaagctcttactagaaggggaggctctggaaagctggaagaggtggtcaatgaggagggaacgagccctaggtgctaggtagaatgaagagaaggtaggaaaggccctcgtccttgtccctcactacagggtacttgagtcctttgtgctagaggcatgtgcaccggaccaagagtcaggagacctgggttctaatcccagctctgccagttgcccacactgagattctgggcacattccttgccctcccaggcctcagcttcccatcttaccatgaagtctcagaccagcagccatgccgacctaacctctgatttctctctcccattctacaaaggggggataaggcccaaaggggaaggacccctatgctcaccctggcctggtcatcctctccctaggagcatggcattcccacagacatggggtatgcagtggcgccccaccactcgggcgtgtaccccgtgcacgtgcagctgtacgaggcttggaagcaggtgtggagcatccgcgtgaccagcacggaggagtacccccacctgaagccagcccgctaccgccgtggcttcatccacaatggcatcatggtgagtgggcccctggaagcccaggaggtgggagaatggagagcacagtctgtcatgtgtgtgcatacgctgtcctggtaagcacggctctggtttgctggcttaggggttgcagatcagcttctgctgcctcctctggcacccgaggctctctgccccagggaaggtgggctgccactccgacccctttcatgagctctttcttagcttttgtgacagaggatcaagcaataatcagcattcttgaaagaggtttctgatgaggatgtgggacagggctctgttacagtctttttgctgattaaaaatttttttcttggctgggcctgatggctcacacctgtaatcctagcactttgggaggccaaggcaggcagattgcttgagcctaggagtttcataccagcctgggcaatgtagtgaaaccccatctctactaaaaaagtactaaaaaaaaaatatgcctggtgattagccaggtgtggtggtgcatgcctgtagtcccagctacttgcagggctgaggcaggaggatcacttgaacctgggagatcgaggctgcagtgagccaagattgcgccactgcactccagcctaggtgacaaagtgagactctgtctcaaaaaaaaaaaaaatttttttttcccctggggcttctaccatgcatctatccctttttttttctttctttcttcttttttgagacagagtttcactcttatctaggctggagtgcaatggcacaatctcagctcactgcaacctctgcctcctgggttcaagcaattctcctgcttcagcctcccgagtagctgggaagacaggcatacaccaccatgcctggataattttgtatttttagttgagacagggtttctccatgttggtcaggctggtctcgaactcccaacctcaggggatctgcccaccttggcctcccaaagtgccaggaattacaggcgtgagccactgtgcccagcctcacatctatccctttccttggcactggggacacagaaatgcacagaacggaggaaagttcctgcccttgtagacctgacattctagtggcaggagacagaccatatgctcatgcatgtgtgttgtgggaagtcagggaccccgaacagagggactggctgaagccatggcagaagaacataaattgtgaagatttcatggacatttatcgcttccccaatcaatactcttgtgatttcctatgcctgtctttactttaatctcttaatcccgtcatcttcataagctgaggatgaatgtcgtctcaggaccctgtgatgattgtgttaactgcacaaattgtttaaacaatatgaaatctgggaaccttgaaaaaagaacaggataacagcgatgttcagggaacaagggagataaccttaaagtctggctgcctgtgggccaggtggaacagagccatatttctcttctttcaaaagcaaataggagaaatatcgctgaattctttttctcagcaagaaacatccctaagaagagaatgcgttcccaagaggaggtctctgaaatggccgctttgggaacgtttgtcttttacagttgttgataagggatgaaataagccccggtctcccatagcgctcccaggcttattaggacaaggaagttcccacctaacaaattttggtcagactggttgtctgctctcaaaccctgtctgctgataagatgttatcaatgacaatgtgtgcccgaaacttcattagcaattttaatttcgccccgtcctgtgatctcgccctgcctccatttgctttgtgatattttattacattgggaagcatgtgatctctgtgacccacaccctattcgtacgctccctcccctttcgaaaatcactaataaaaacttgctggttttgtgacttgggggtcatcacaggacctgccaacatgtgacatctcccctggacacccagctttaaaatttctctcttctgtactctttccctttatttctcagactgacagacacttagggaaaatagaaaaggacccatgctgaatatcgggggttggtttcccccaatacatgtgtaaaatatacagtggtcagatggtgatgagtgccacggacaaagttaagcagggaatggaaggaaggaatgctggcaagagaagctggtttaaataaggtggctaggtgggccttcctggaataagccacgctgccacatgaggaagagcactcaaggcagagaacacaagtgcaaaggccctgaagcgggctgtgctggctgtgtttgaaggccaaataggaggccgggatggctggaggggagtgagggatggtggtagatgaggtcggggtgggtgatggaccagatcgatagggccatgtaaggccagccattggatggccatgggcttttaggctgagatgggaaggttttgaatggagcatgatctgactcatctttgaaagggatttctatcattctggctgttgtgtggagcagagactgtaggggacaaaagtggcagcagggagaccagttaggaggcactgcagtcttccagaccagaggtggcagcagcttggaccagggcccaatgttgggatgtggccatactctgggcttagaatagttaggcctgtggttagatgagttagatatagggtgtgggaggaagagaggagtccaagatgactgcagggtttttagtctgaggtgctggaaggatgagttgtcatcagttgagctggggcagcagtgggtaggcaaggtttgtacatttgtccatcagtccatccatccatccactgacctcagcaccaggccctcgtgctgaactccaggcactcctttaggtcctcaaccctgaactccagggatgaggtggtgacaaggcaggcccattccctgctcccttggagctcacagtttcatgaggggagacagacgacaaatggctaagccagtgtgtgacaacgagtgtcaccaggtgaggttctaatgttgcaagggggcttgcagaacatgtctgggattgctgcttcagagagggccaggcaggggccgtggctgcagcagtcccaagtttccagaaacattcccactctgttactttgaggcctgctcattttgtgcagagaatagcagtgaagtttgtaaaatggcaagggcctgtagttcactggggggaacgctgtgctgtaggctgcacccaagggtaggggctgtgcgaccacatggagactgcctttctgaggagcagctgggccttcttcctctgaggaagagtcctcccaccaccctcatgccagaaggcaccatagctcctctcccccaccccctcctcaggttctcccacggcagacctgcggcctcttcacacacaccatcttctacaacgagtaccctggcggctccagtgagctggacaagatcatcaacgggggcgagctcttcctcaccgtgctcctcaatcctgtgagtgctccacagcccatggctgctggtgagaaggggctgctgcacagcctgtctgcagctgacacaggcttcctggagccaggaaagggtggagaggcatgagtgagtgcctggcagttgggagacccactctccagcactggccctgcctcggctgtgtgaccttggctaaagaatccgagcatgctttttttttcctttcctaatcatgtactttaatacaaaagtgttggcatttttatgcatgttcccttcagtctttgctcatgtgtgtatacacacatacacagatacacacacatatatgaacaacatttgagttttctaggtctcgctttccttatttgtaaaatgcaaacaattacctctgctttaataatattaaataaacttcaagtggtggttgttattcagctctgtgggctgagtactctttatcttccatgcaccccacccctaacatttacaaaataaaacccaaatagctcccacattgggtctgctttccatttcaggattgtaatatttggggtcagtcaggcctggttcgtctgtcacctcatccaagtactcgcagcgagtttgttgacagcgccagcgtaacttccactggtcatcaggagccttgcaagctaaggcagggtcagaagggtcagagttggcggtgagggtggctcagacactgatgggccctgcctctctcctcccctcccctggagcagatcagcatcttcatgacgcacctgtccaactatgggaatgaccgcctgggcctgtacaccttcaagcacctggtgcgcttcctgcactcctggacgaacctccggctgcagacactgccccctgtgcagttggcgcagaagtacttccagatcttctccgaggagaaggacccgctctggcaggtggggggctgggcagcctgggcaggttgctacagggatggaacgccaccactcacaggcacacactccagatatggactcaaggctcagccatcatgccttcacactctcgctcgaatgtaaactcaggtccccatctacttaccagcatgggtgcgttcactcctttgcacacatgcatgctcatacatgtacatacttccccacgcagacctacatgcatgcagtcatacatagccttggaaaaaacagtgttaaaaaaacgagtgggctggacgcagtggttcacccctataatcccaatactttaggaggccaaggtggctggattgcttgaacccaggagttcaagatcagcctgggcaatatggcgaaaccctgtctctacaaaaaatacaaaaattagccgggcatgatggtgcgcatctatagtcccagctactcgtgaggcagaggtgggaggatcagttgagcctagaggttgaggctgcagtgagctgtgatcacaccactgtactccagcctgggcaacagagtgagaccctgtttcaaaaacaaaaaacaactccaagtgaacacagtgcagacaaagtacagaaagtgaatgcgttgtcttggtcaggctcttagataatctcttgtatctcttctaactccagcaggctctgagtgggaaaagggattgatgggagggtttgggggccagtttttgggaaagtctgctcctacgggcttttaaaaagtggaagcagaagctggaattggtgacagtctcatagttcagaccaggagtccacaaaccgtgactcatgggccaaaaccagcctgagacctgtttttgtaaagaacgttttattggcagacagccacgctcattcttgtatctactgtctatagctgctttcatgctatgacggcagagtcgagtagttgcaatggaaacttccatgccccaaacctaaaatatttactaaacacttaccaaaagattaattaaactttataggaagcgtttcttgaccccctggttcagacgcagcttgtccagttaaattcaacaagtgcttatgagttcctgttacgtgctaaggggcattttgcgagctctttgggggacatgaaactgaccagaagtggagcctgcctgtcagtggctcagtgtctgggggtggggatgtgacaaggacacatgtagcatgtaggtatcatgcccattgggctgtaagggccacatatccatgtgcagtgggagtccactgactgggttctggggcgccccacacatcccttccactgttgttttaggacccctgcgaggacaaacgtcacaaagacatctggtccaaggagaagacgtgtgaccgcttcccaaagctcctcatcatcggcccccagaaaacaggcaggtctctctgctcttgaccgagcttccccaactgcctgctgtctcagccacagaattctgaggactgccttgccctggccccactcccggataatttgctccctctttcccaggaagtaggaatgaagttggggtgaacacaaattgcctgtcagtatggaggggaaagaggtggaggaggggcctggagttctcctatttatcctgaaccatagcctcagggagctctccctgcattatcctgggagtctccaagtccagtcagagaagcccagatcagttgctctgctagtttgagtaatgccaagcaaaactggtacaaagaggactgtgatcaattagctatgtctgccagaggtgcagtagggagaagcagtgacatgattgctaagcatttgtcatccatacaaccctgcaaggcacaaatgggcactcccattttgtagacagaaactcaaggttcagagaagtcaagtgacttcccttaacacattcagttaggcaatggcaattccaggcctgaactctgatctctgtgaccctgaaacatatactcttaattgccaaactctatagcctccttctcttctgggctctctcattatagcatgtaaaccatagacttataccacagaaagtgaatgaactcactgaggaggaggtagggcagggtgcatgagtgagcagagggtattgggaagaagagacataggaacaagatttcttagttctttaagaatttcacattaacagaactgcagggtgacaaactcccttttccctgagctcctaccaagtgccagaggacagaggcccagagctggaaaggaccagctcttctgggatgctgaggggacagcagtcagttaaacatggctaccagagtgcagtggtgaggcagattctgaggccacgtcctcgtttagtgaagagtgctgtgatagattagcgatgtccgtagtaggtacaggagttgcggtgttcacatgcatgccatatatttgccaccctggatttagtaattccttcattgcacagatgaagaagctaagaccagagaaaggcagagaccttcccaggagcccccagtgggtcgtggggagctaggcccagaacccagactctatcttttggctgggggctgggccctgggtctcaggtgtctaccctccccacaggcaccactgccctctacctgttcctgggcatgcaccctgacctaagcagcaactaccccagctctgagacctttgaggagatccagttttttaatggccacaactatcacaaaggcatcgactggtgagttggcctttctgtccacagcgggacgggaaggccatcctggggcctcccaggagtctgctgtggccacagcaggaagcagctggagcttgctcacacacagctgtcattcctgtaaacagggacaaagtgcagtgacccttgaatcatggtgtgacagcgttgtcatagacaggacactcgatgaggaggccctttgcccctttgctctaccgcctgtagtcagacgctgaggtcgaagtccacccctcccttgcttgcagagaaacatcctgagtcttggggaggagaagggtttgcccagggtcccaaggtcggaaatccaaatgttctggctctcctcactgcgtgtggctgactgtgaagcagaggtgttcttgtgggcccttcagggacaggtcgctggtctttgggcgtcacttggggaagtcattaagattgccacttcccaccagagcctgcagaggttacctttgtagaggttcccagcagagggtcctagtagaggttcccttaagggtgtgggggccagagcagagatggttttactctccaccttttcagttggcatctttctctatttgccttttttctttctttttaaaaaatgtttcatgtcaggtaggtaatgtgctgagatcataacaaggttcgaggtgggtacacctcacacgtgtgtgaacacccaatcatcacgtgcatggactgcaaagtttgcctttttaaaccttgtccatgtattaccattatttattatttttatgtcagtgggttccctgggtggagaggttatgggccttctgtctttcttttttttttttttgagatggaatctcgctctgtcacccaggctgcagtgcagtggcgcgatctcggcttactgcaacctctgcttcccgggttcaagtgattctcctgcttcagcctcccaagtagctgggactacaggtgcccgccaccatgcctggctaatttttgtatttttagtagagacgaggttttgccatgttggtcaggctggtcttgaactcctgacctcgtgatctgcccgcctcggcctcccaaagtgctgggattacggcgtgcgccactgcgcccggcccatctacctacatttctaacatctccacagtctcttgtctaaaatctagtgtggtcagatgaattattggaagtcaacatttttcaggttttagaaaggtaatgtggtgcgaaaccatatatttagtaacatcttcagcgacacctggggcagcaccctgttagcaaattcattaatatgtctgtagcaaagtatgtgaatatttacactaagtaagaggaataagtcaggttttgttgccaaatggctttgctacaaacctaggaaacaaagcctgtgttttcaaagctttctcaattgagatattgtaaacaaaggattgtggacatgcaaagaaaattcagaaagatgagagaagacgtaattccttggcccaattcccaagagcttgattttgtaggtaggtctaaagtggggtgcaggaatccagcaggcccccagaacgctctgatgaagcacatccttgggaccagcctggatcagccccacctcacaggataggatagggaccctgtacccttcatgagagtggactttgcttcccacaagccccagaagttggaccctgagtttgcataggtagattcccctgggagggtctggagtgttcctttggtttccagaggttccttcatccagaggtggccattgctctggtgggatatgggcattagtctggaaagccgtgctcacccacagcaggctggggaggggttgtgggtagcaggaggtcctggtccacagtgacggcctagaaggtgttcccccaggtcaggaaagaaagtccgccctctggaggccccctctgctctgtgccagcctccctggggcagtcctggagccactctgagccccagctcgccccctagaggcagagagagtgacagccctggcagttaagcctggagcagctgagggggcgggatcctagagtttaggattgaggggcattaccccctccccatgacctgcaactgccggcgcacccacaagtcttcagatcctcccaactccagagtcttctggaaaaggaacgaatttgaaacagggaggctgccaagaggccattcccctccagaatccccactggaggcaagtccttgtttggttgggagcaaagcttcccacttgctctctgaggacattctaccccagtgcctcgcccttgtgctgcattcccttagccccctcctcatgagttttgtctgtgagccgcctctctgggcttcctgcaggtacatggagttcttccccatcccttccaacaccacctccgacttctactttgagaaaagcgccaactactttgattcagaagtggcgccccggcgggcagcagccctcttgcccaaagccaaggtcctgaccatcctcatcaaccccgcggaccgggcctattcctggtaccaggtgagtggggctggggtggagtccctgtgtcgggaacacagggctccgtctgacactcagttactcactcactcaacagatattattagtaagcacctactgtgtgccagccctgagccaggcgcctggagcgtggtgatggctgagaatagagtccttggtggaggagacaggcggaaatggaaagccagccaccagttgactgtccacctgcctagtgtcatgcggggtcctgcctctacttctgacactgacaagaggtggaggctggttacgcctagaggaagcttagatttggtgaacagcaatgcaggatcatactgactatagcttcctcgctggacacgggtgggagtgggagctcatggaaggacaagacacaagactgccattcacagtggagaaggcaggcacctgaccaagtgaggcagttacctgggctgtgatacatggagagggtgtggatccaagcccctatctggggcatgtatgaaccagagctgtcttttttttttttttttttttttttgagacagagtcttgctctgtagcccaggctggagtgcagtggcctgatctcaactcactgcaacatccgccttccagtttgaagtgattctcctgcctcagcctcccaagtagctggtattacaggtgtgcaccaccacgccaggctaatttttgtatttttagtagagacagggtttcaccatgttggccaggctggtctcaaactcctgacctcgtgatcttcccgcctcggcctctcaaagtgctggcattacaggcatgagccactgcgcccagctgaaccagagctctctttaatgcctatggcctgacttaatttcctgcctgccagcccactgagcctgcaggaatgcttttaggccttccctggtggggtaggcggagtccctcccctggctgccagcattcctgtgattatgccacacagccaagcactgtgattcagaagtggcgccccagcagaaagccaccctgttgtccaggccgaggtcctgagcatcctcgttaacccagcagaccaggcctgtgcttggtgttggggagggggtggggccctgggtcttagcccatggttgccagagaagtgtcccctgtcctggctgggacagcctcttcaggcctggccactgtcatagttcccaccctgctttgaggctcttttctcagatgtgacagtggctgtctcccgcctgggaccttgcggtctcccgcagggctggcacctgcctcctctttgctcccatggaagtctctcctcctgccactctctgaggctggtgaggaagccccttcttactcttgttctctagggcttctgtttatgccctgatgtctgctttcctgtggctttttctttaggagaagaaaaccgagaaacacttgtcaagtgtttctgttttctgccgtgctgtgtgcccccgcctcctggcgctgtgcagggaatgggcagtctgctttcatgggggaacgtagggtagagagagagccgccacaggttgggtcagtccctgttctgcactgacactgctgtacatctgcaccttactggagagtcacagctggtttctagaaggcagaggaggggtttcacgtttgtgtccccttctcaaagattagaaaaccaagtttcagcaagtttcatgtggtggcatttgaatccaagtcttctaaatctaagaccctattcctttttctgtccatgatcaagaggggtaagggatagaaggagaagggagactcattctccccaggaggacctgggaagatgttggaggagaggaagggtgggggcctgtctcagaaggaggtcgggacgaggaggacgctgctgtgcaccatattgccccagccctgggctgtgtgtgatcctcaggggagggggttggcggctgggggatagtgcctgtcgcacaggtgcctgagctctggctttctggacttagtgaattctgcagattcggacctcccatggcattattttaagtgattcagaccagccagtctcccttttatagttctttcccagtccttctgatttccataaaggagaaatgctcactttagtgcaagtggtcttacgtcctttctaacactgtcaacctctgctttcaacaaagagagcatgttcagggcctgttgcacacatttgtgtctggctggagtttgagaacattgtttttattgccatttgtgagtggttgccttctatatatgacaacagtgcagcagcgtgatcttggctcactgcaacctccaccccccgagtttaagcgattctcgtgcctcagccttccgagtagctgggaccacaggtgtgcaccaccatgccagctaatttttgtatttttagtagagacggggtttcgccacattggccagctggtctcgaactcctgacctcaagtgatccacccaccccagcctcccaaaattctgggattacaggcatgagccaccatgcctggcatcaggaaaccctgatttcgtccagttcccgtatttcaaagatggagaagttggggctctgggaccagtggcttcccttgacactggacacagtgagaggcagagccaggactcagacccagagctcctgggtccagctgaggatcttctggccaccttgcgggctgctgtccctctcaggccacttcctttgtgtcctccaagtggcatgctgaccctctttccttgcctgcagcaccagcgagcccatgacgacccagtggccctaaagtacaccttccatgaggtgattaccgccggctctgacgcatcctcgaagctgcgtgccctccagaaccgctgcctggtccctggctggtacgccacccacatcgagcgctggctcagtgcctatcacgccaaccaggtagctgctgtccctgacccttgtgagggcagtcacagtactggcttgctgtggttagcggagagcctccaactctttctcaccagccgtggggacagatatgccctccttggagagctagacccttgggtctataaaaagattttattattattattattattttgagacagggtctcactctgttgcccaggctggagtgcagtggtgtgatctcagctcactatagcctcgatgtcccgagctcacgcaatccttccacctctgcctcctgagtagctgggactacaggtgtgagccactgtacccagctaattttatttttttaagaaataaggtcttactatgttgcccaggctggtctcaaactcctgggctcaagcagtcctcccttggtcttccaaagtgctgggattacaggcatgagccactgcacctggcctaaaaagactgtagacctgtttatcccaaggttgatacatgagaactccccaagcctgtgtcccatcaccacaggccctgtagccctaaagggacccagaaagccctgaggcaggcaggtgggagcaaggagactgggcgtggtgatggagggagagcctgatcataccaggctgtttatgtatttatttatttatttagagacggagtctcgctctgtctcccaggctggagtgcagtggcacgatcttggctcactgcaacctctgcctcccgggttcaagcgtttcttccacctcagcctcccaagtagctggaattacaggcatgcaccaccacgcccagataatttttgtatttttagtagagacgggatttcaccatgttggccaggctggtcttgaactcctgacctcaagtcctctgcccaccccagcatcccaaagtgctgagattacaggtgtgagccaccgtgcccggccatgcccagccataccaggccttttaggcaaacttgcggagtgtttgagcaggagagtgacatggactggaagctcagagagaggccagagagggatgtttgtagggacctgaggggcaggcagggtttggtgagagcttaaattctaggagaaatggcattgggcagcagaagctggtggaaagcaggcgtgagaccacagaggcctgagcttggggatacctgcccttcaacaggggaggaggagccagttctagagggtgcagggtcccatatttataagcaggcccattcctgctgccgtggctgttgcccttgtttgccaccgaagtcaaagcaggtcccgatcccctttctccctttccagattctggtcttggatggcaaactgcttcgcacagaacctgccaaagtgatggacatggtgcagaagttccttggggtgaccaacaccattgactaccacaaaaccttggcgtgagtgttgccttttcctttctgcaggttatttccctgataaggcacctgggccaacaaagccaaagtcttgaataattatgagagagagaagttagttagagtcagaaagtatggaaagttattaatatgacttaagtcatattaataaaggtatcaccttaaaaaaaagggagatgatgaatctgttctactctggtcagaccatcctggggtcttctctttggtctgggctgaacattttcagagtgttttatgtaagtaaattagatcagtaatgagcagccctaattcccacaagattttcttagcattagcttttttttttttttttagacagggtcactctgttgcccaggctggagtgcagtggtgtgattttggctcactgcaacctcaacctcccaggctcaagtgatcctcccacctcagcttcccgagtagcttgggaccgcagacatgtgccaccatgcctggctaatttttgtatgttttgtagagaaggggtttcaccatgttgctcagcctggtctcgaatgatctgcctgcttcagcgtcccaaagttctgggattacaggcatgaggcaccgcccccagccagcattagattttgacttacgatttcaggaaaaggaaacacaaatgttgttgacagttaataaccgtactcactcagaacctggtgcaagtgcgttgagaatgccctcccactatgagtaaaggcctgcccgcattgcatgggctcagggctaggaaaggctgctttcctgtgctatgtcacagataagtgacacactcagctggatgaggggaccccaagagaaggaggaatcaagtcaccctccttggctccattcttgggaaagttttgcaacaagaatattccgtcttcactgtcgtgggagttgaaggtggagaagggaagtcagtccttcaccttgagggagaaggggccacctgctgaggctgtgggccatggtgtcagagatgcctgggttagggccccacatccatctcttcagcctttcaagcctcgctttcctcatctgtaagttggggataaagataataatccctgcgtcctgaaggccactgaattgaatgaaagcttcatgtggggctcttagctgagagcttggcatgcactaagtgctaaataaacggtagctgctattgtccttgtcatcatcatcatcaccatcatcatcgtcatcgtctatacctatcctatgaccctttcagaaatctctgttctccttcgctattcatgggaattctgttttcttgatgccctcatgctcaagaatctcctcatagttcctcatccagggctaaattctgatgtcagtattcctcccttcccataacagcttcggatctcatatcccaaaaatgcctttgaagacaggatgatgttggcagtcttgctgtgtcatttctgaagtttactccaaaaaatgaaattctccagtgacaggcatgcttaagtgcagctgtggatactgcatgttttgataaagatgaaatttattaaaaagcaaaagaacctccactaaacacccctcttcccattgacgctgggaggggtaaagaaggcttcttgggtttaaaaaaaaaaaagagttactcagcattgagaatgctcagaaaagatttcccagaacactgaaggatgggaaactgttcatgttgtagattgctgaagcggctgtggctggtcgggctggaggagagaagactcagaatgtgcgagctgccctttgccggaagtaggacaggcacgtttagtgcagcctaggacacatttgatcccacagatggcacatagcttctgacagtccatgtgggttcaagagcagtagattccctggtctctgccattcctggggtccatgaacatggctttaaggtcggaagtgggtggctgagccagctcccatccaaagactttcccacctccacaggtttgatccaaagaaaggattttggtgccaactgcttgaaggaggaaaaaccaagtgtctgggcaaaagcaagggccggaaatatcccgagatggacttggatgtaagtggtggacacactacctgtagcacctgcataagggtaaggggtccctgtatggagttgagggggattctctttcctttaccatgcactcagcatgttcatggccttagcatttcttggacagtatttgtaagaggaggaaaatgggggctgggacatggtgggtcagacctgatttcgtcaaacaagtgttggttaccttctactaagggctgagtgctgtggggttttgaggatgagccagacatgttctctgccttcaaggaactcctggtcttggaggggtatgagtcccaacaccactaagtagaatacaggcagagagtgctgcgcgcagtcagagagggcacacaagtgctatgggaattcagaacaaggggatgtcacttgaacctgagaggggtaaaaaaggctccttaaaggagggatgggggtctctggagttgcgcctagaaggatgagatccattttgtaggatttggacatatggaatgggagggtaggtaagaacagcatgtgtaaaaccatagggggaaaaaagaaattttaaaaatatatagaaaaagggtcacagactgggggtcttgttacttcctccttttcctacttgcttctgtttttgttttgttttgttttgttttgtttttgagacagggtctcgttctgttgcctaggctggagtgcagtggcatgatcatggctcacagtagcctcgaccccctgggctcaatcgatcttcccgcctcagcctgccatagtgctggtattataggtgtgaaccaccgtgcctggccctggccctgcccgccttgggttttgattattaattctctctcctctccctatcagaagaattttgacttagtgagctatattttgatgctcctgccaactgggagttcactattggaggctaccatttagaaggagattgtggataaataagaggtgtatggggggtggtgccagcagcatggtgggttttttgtttttttgttttcttttgagacggagtttcgcttttgtcacccaggctggagtgcaatcgcgtgatcttggctcactgcaacctccgctttccgggttcaaaagattctcttgcctcagactcccgagtagctgggattactggcgcccaccacctcaccccgctaatttttgtatttttagtagggttttcccatgttggccaggctggtcttgaactcctgacctcaggtgatccacatgcctcggcctcccaaagtgctgggattacaggcatgagccaccgtgcccggccgagcatggcgatttttagaggaggtcactcttaagtcagtacacaaggtctgagctttccttcccgttacagtcccgagccttcctgaaggactattaccgggaccacaacatcgagctctccaagctgctgtataagatgggccagacacttcccacttggctacgagaggacctccagaacaccaggtagccgtggccaccacagccagactgaacgtttgtgaaagctgggacatcccaccacacgctgagccagacctgcagagtgggaagctggaccagggcagctgcgcacttatgagcaatactctgtggaggtctggtggggctgggggagcacccaggcggatctgcaagcacctcggagcacccaccgctgggtctgcggcctaagggacctccctcgccagcagaggtccattccgttcccagctgctcctggggaggccgcttcctggtaggagggagtccacgagactcttttctgtccctcactgtgttccgccgactgtcccctctcgtcacccatcactccctgcttccgcagggcgcccctcagtattcgctgccatatgtccctgtcctccaggctgtaggggaggagagcctggccgggggagacagactggacatttccctgtttcgagccaggctcttccaaggggccagctgggtccccggagtcagtcctaggctggatgggagggtggccccctcaagaggactcccagcctccacatctggttcctaccttcacatctcaccctcccgttctggggaagaatttctggttcctacagtatccactccatcctcaaggcttcccgcagggccttggggcactgccttgccatcgggcccagttctccgggccccacctgcacccctttcttccccctgggatatgatgtgtggtgtttcctgtggtaaaagactgaggcaggccaggggtctgccagtaacatgttcccatgtacagacacggtccccacaccctcccagcctcaggcccaggcagacatgggcgagctggtgagactgccagccacggctttgcttagccacctgtggccgagggctctcagagacccccttaacctcccaaatactaagaagctaaaatattttaatattttgtttttttttttcttggtgccagagtttataccctgggtgctggggtcgcactgtgttatatatatatatatatatatataatgtgtatatatatatattctattttttttggttgggttcgtttttaattcagtcctacaaaatggtggtaagccccagtctcaggggtcaccctgtcttagagctagagatgaggtggcagggagggaggctgtgtcctcagtggcctggggctgagcagaccttaggaaggggccctccccagtgccgtggctgctctggggctaccccaggtgaacagaggtggtgagatgcgcagggaagaccagctctctccaggacatcgggctgcgtgaagtccagtgaccctgaggggattttggccaaaggaaacagccagggctgggctaggagagctggggtcaaaagctgccccacccactctccctcacatggtgctaggctgggagctgccctgagagctgggatgcccaccaaggcccacagaactgtctccaggcccttgtagacagtgggatctctgggctgatttctggttggggtctgctcctaccccaccccatttaacaatgtgaagtgactgaggctggggtgcctctccctggccccctccaactgccaaattctgcttccctctgaaccccaggaaatactttctggagaggcttgtcttgttcagaagactctagcatcttggggctggaaggtcctttgacgggtatgaaacaggtccagaaaggggaggtggcctgcttggccgacgtcatggagccagctgggagcagggctgagcgttgaacccgaggctcccggttccaagtcccatcgtgctcctcttccaatgccacactgcctctgagcccatccttgggaccctactctgtgccaggttcctgtcccttcctccgtcacagcatggtcattccaggatatggggacaaaccactccttcccagccagggtgcctttgagccttctcattccgaggtctgcgtttgcatccctgtcgtgttctccctcgaggggtccttccccagcctgtgggggcctgggtctgttctgagctgattcccttttctccagttctctgctgggatgaagaaagttggacactcagtgggaccagctgcaggtggtttcactgtgtacacagcagtgtccccatcatgcctctcaatggggcctgcaagcctgggaacttgggcatcgttgggccagcaggatgagcagcaaagggtctgaggacagggtggcatgtctgcttgtgtgctcatgaagacatgcccacgccatggagccaggggcttatagagaggggcagtgacttccagagtcccatccgtcagtgaggggactgggctgcgggatgggtgaggatcttacagctcccaggttcggaaatctaccctctaggcctggaggcctctctcgcagagcatggaaggcaggagaggtgggctggcctagggcaggagctccacttctctctgcctctggctatgggaaggagcaggcggttggaaatcctgtgacagcagagatcttctggatttttgcctggacccttctgcaagcctggagactggacctgccacatgttccaagtctgtctgcctaggtcactgctgccacttctcctcccactaacagacctttcttgaagacccactaggtccagacactgccgggacttgcaggtatggggggtagaaggagaggcagataagctgcctggggggctgttagctaatgggtacaaggacaccccctcccgagaagagaagccacagatgagtgggccagcgaggccagtcttcaatgtccactaattcactctaagcatttggccaaaaaaaggagagagaaataactgaaattgttcaggtggctccatcgtctattctgtggtcccctccatgagcctttgccccagggtgggtgcaggtgcgagtgtcacctgcagctgcctcagtcattcagagttccagagccttctgtggtggagcatcctgctgcttggaggatgagtctgaagtttaaaaatgggccttttctgagcccccctgatgagcagtcagtgcttctgggcccagctaaggaagccatctgttcccagcagaggagagctgctgcgctgacctgcagaggttggtggtcccagcacagagctgtgcccatgggcttgttagtgggaaaagcaaatacaacaatgttttaccaaacatttaattatgaatgcccactccccagcatctagatctaaaattattaacattttgccacattctttttctctctctgtgtatgtatatgttttctctgtcctaatttaaaagtacattgcaaacatcatgaaacttgatccctgaaagcttcagcctgcatctcctaagagttagggcattgtcctacacattggcccagtatcacagccaagacgagaagtcatttcccagcgatgtctgctatctaatctgtattcaaatccccccaattgtctcccaggtaacttatgtgtctggttttggaatcagcatccagtcacggtgcacacattgcattttctaactatgtttttaaaacctctttgaatgctgaaaggtcttccctcagctcactttgagtttttaaatgacattgtttttgaggccctaggcctgctgtctttttgaagccccacattctgaatttgtcagattgtttgctcatggtgtcgcataaccacttcttctatcccctgtactttcaaggataatttaggctacatgagattttgccttttgtgctgacttgacagcttcacttctgcctaagatgcgcctccactgtcacctgtaccaagtgccaaaacagcagaggggccagttagagcaagagctctgggggggccggaaagtctccctggagaaggccgtaatatctgggccttggaaggaaggacacagggctctggaaggaggaggctgcatgcctgaaggctgggccttcgaccctggggatgggccacagggcaccaaacacatcatatgtctctctctttctattttggggtcccagggttttcatttcctggagacccgtggtctgtgtgcactggagcagagccaggctctcagttgcagcagggaaaagcctacatggggaactgcctcccgcaagctgtggtgtgagaagagccctggctggcagcaggagctgtgaagtttcatcccagccgggtgcatttagtagctgcctgaccatcttcctcccaggccctcagtttcttcatctgtagaatgagcagataggggccacagcagggattttcacacatcaaaggaggcagcctctgctctagttgatgtgaggatgagggggcggcctagaccccctgctgcccaggccgttgaggcaacactgggttcctggcttgacagctgtgggctggctgcccttgccagctcagacggctggcgagttttcagcttccctaagggactggcatagggttttgtggggtcaatgccaggaacctgggggaaactggatgcgttttatcctaagaagttcatccctcctgctcttactgtttccggccctggaggagaatgagggaggagagggttttctatgactgtgttagcttttattattagcaagagggctccttttgtaatttgtgcatgaaattcatgtcatttcctgggagaggagagggccgactggagagggtggggggcacactggggaagcaggcagaggtttccttcccttgtaggggggtggggagagtggggagagggggtgctatccagttcgcctgatgagggctctcgaaccagccgttttgggttgtgttaaaggtgagaccttcctccattaatgtacaatctcgaactaactgctaataaagtggggttctgtttgtacaccttggtcctgtctgacctttttgcaaggcccgcagggaagggtggagtaggggtgtttgcatgcacggccaaagcccgcttgtccctgccacctcaggcatgcacacgtgcccacatgtatgcacacacctatacacatggtgacttggtcaacgcagatcattttcactgggttataaatggaagatttcccagatacagcagaggcctatcctagggcagccacagggggcatctcaggtgatagaagccctcagacaagctggattgctcagaagccctgggtgtcgggcactggaccgagaggagacttgggggctggaacaatttctgctactaatgtatattgtagctgggggcaagccacttttactgttttatcccatttccctcaccttttagacgcatggagggagttggactccatggcctcacttgaagaacttgcctaaaacatgcagattcccaggtctacttccagagattcagctccagcagatgtggggtggggcccaacatctttaaggagccctccagtacactgaggaatttataaggagccctccagtacactgaggcagcccagtgtaactctggctcagagtgggaaactctgactcagatccatggttcctatgggttctaattaatacggagagccccactgtccaggaaaacttagggtaaaacaaatgactgaagccctcacagcctaattgagggccagactcgagatttgcctggagaaggagagttcacaggtaggggcccaggccagtgtctgcaatgcaggtgatcagacatgctccttcagaatccccttgggaagctttaaacaatatacattcctgggctcccccaaaatctgctcactcagaacctctggggtgggacccagcactgtgtactttaacagactccttggtgttcagggaagtttgggaacactgaatcaggccaccatgtttgtcagagacggtacccagaaatgtgcacagcttctgagggacagaggaggggcatgctggggacacagctgggcagtcctgcttcccaggacccagtatgttcaaagtgaaataccacagtgccacctctgatggcacaagggcagcacctgcagagccctctttgcagttcgtcagctgggagcttggtttgggtcaggtggccctcaccagcaagaacacagctggaggctgcatggacaagagcagatccagaggcatggtgcagaaaggtgactgtgccaactgaggggtcagcctgcaacagggatttttgaatttacatacagctgagattctgttttgaaagaatcacttaattgaaaaccaggtaaaggtgggggtgctctgtggttggagtgggagtgaagctctggactcttcccagctcacctcctccctgtctctcaggctatcttggaaccctaagatttctcaaaacacattgtgaaaacccagcccagttgcttccagaggtcctaaaagtcct

SEQ ID NO: 394 - DNA, 21934 bp, Homo sapiens
  source 1..21934: mol_type = genomic DNA
gcgctcggacagctcgaggccttcgggatagagcacgccgcgtttctggcgccggggcaggccggcgatgtccgagtcgtcgaagggcatgcacccggtgaccatgacgtagagcacgacgcccatgctccacacatcgtacttcttggggtcgtaggggatgcccaggagcacctcgggtgacgcgtaggcggctgagccgcagtaggtggtgctcaggtctgggtagccatgggcctggcggccgaagccgaagtcggtgagcttgacgcggcgctcgtccgggctcagcagcacgttttcgcacttgaggtcgcggtgcaccaggtgatgatcgtgcaggtagcgcacggcgccggcgatctgcgcaaagaggtcgcgcgcctgaactccggggatgcgcccgttgcgctgcacggcttgcagcaggtcggtggcggccgcttccatcacgatgtacagtttcccgttgcacacctcgatgaactcgaagacgtgcacgatgtgcgggtgtcgcacgccccgcaggatggacagctctcgcggcaggaacttgttgacgaagtccgggggcgctcgccgccggtccaccaccttgatggccacggtacccttgtacttcttggatgtggccaccttcaccttggagtagctgccctctccaattgtgcggcccagcttataaccgagttcgctcagaagtttgtctcccgacatggtggcgcctagggcgcacggggggcaggaggcggctgctgtcggggggcggccggactccaatctcgggtctaagccatggcgcttggcacctacacccccgcacccccatgtgcccactgccagacattggccgctgttgtgccttttattgccccgtaacaatttttgccttgtgaagtgactgcgggcgtcactccgccttagggtgggggtccgggaccccgccccggggccaccctagcctccctgctttgtgactcataatcatcctgaatggtcagtttccgatgagaggccactagcaagggatacccatcaccaccagggagcagaatccgttccagggattggggtgagtccgacttcgagcagcagctgccccccaacatcatgtacccagcccgtgactacgtggagccctgggcttcgcgtagagtccctagacggggcgaaaacgggaaaaggggccttaactggggcacctggctcctttgagagctcggagtttctgactggcctgcgcaacaccccagaggcaaggtgaacgcgagggcctataatgcaagaaccaaggcgagtcacgccctgtctgggcaaaagaggagtaaagacccctcagctgcagcccggcagcgcattcctacccagggtccgccgccagagctttcccgcgcggtcggatagttacactactgtccgggacttcctagccgtgccgcggaccatctcaagtgcttccgccacactcatcatggcggtggcagtaagtcacttccgcccgggaccggaagtgtgggatactgcgagtatggcggcgtcaaaggtgaagcaggacatgcctccgccggggggctatgggcccatcgactacaaacggaacttgccgcgtcgaggactgtcgggtcagtatcactctgcgccggggtctcagagtctgggcactcggggctcgggggcggggttccggggacacaggcgggcctcagttttcccggcggtgtgaccggaggcggagcccggggatccatcatagcttctgtaataacgctaagtgctgcagtttgttgaggtctttcccagctcctcttccttctcgtaacagcccaggaaatcggtccctctagttatttacgttttacagtgggttaaactgagtcatagcctgtgctctggccctcagccacccttggatttctaagatggggaaactgaggcccaaagaaggccgcggctccccaaggcaaagctgaggccgcaacccggaacctggagggaatttacaagatgttctatgcagtggttccctgctggcagcccccgcctgcatggtgtcacaggaatccatattctttaaattttcaattttttttttttgagacggagttttgctcttgttgcccaggctggagtgcaatggcgccatctcggctcaccgcaacctccgcctcctgggttcaagcgattctcttgcctcagcctcctgagtagctgggattacaggcatgtgccacaacgcctggctaactttgtgtttttagtagagacggggtttctccatgttggtcagggtggtctcgaactcccaacctcggatgatccgcccacctcggcctcccaaagtgctgggattacaggcgtgagccaccatgcccggcgtaaagttttcaaatgtttaagtaacacgttaaattttgttatcgggctcagcacagaaaattgaaaaagagaacttaaaaggcgcccatactcagtccccaggttaacagacaaatagaaacttttaaacgtaatctaagagtgaatacatacatttctttttttttttttaagacggtatggttctgttgcctgggctggagtgatttcttggcaacctccgcctcctgggctcaagccatcctcccaccccagcctcctgagaagctgggattacaagcatgcgcccagctttctgtattttctatagagatgggatctcgccatcttgcccaggctggtctcgaagtcctgggctcaagtgatccacccacctcggcttcccaaagtgatgggactatcggcatgagctaccgtgctcggcagaatgcatgtctcttaacaaatcaaactttacatttaaattacatgttatgcacattattcctcaattttaacacacacacaaaaatgagcatggtaattaaaaacgtaataattcagacagtagaaaaatcagtgtgaggtgaaaagtcctccccagccccttcttggtttttttattttttatttctactttttgtagagacagggtgcagctatgttgaccaggctggtctcaaactcctgggctcaagtgatcctccagcctcagcctcccaaagtgctggaattacaggcatgagccaccgcggccaacctcctcttgtttttcttgtatcccagaactgagattggcagactttttctataaaagggacagatgacaagtattttgggtttggctggccagaaagtttcagttactgagacaaccatttacaaatggaaagtgttcttagcctgggggctctacaaaaacagattgcctgtgagccaggtggctcatgcctgtaatccccacactttgggaggctgaagcgggaggatggcttgagcccaggagtttgtgaccagcctgggcaacatagtgagacccccacctctaccaaaaattaaaaaaaaaaaaaagaggcttcaggctagatctggcccatgagtgctgtcccagaacacattggaggaatataatgcattctatttcctcatttttcttttttcttttctttctttcttttttattttttgagacagagtctcattctgtcacccaggctagagtgcagtggcccgatcttggctcactgcaacctccacctcctgggttcaagcaattctcctgtctcagcctcccgagtagctgggagtacagttggatgccaccacatccggctaatttttgtatttttagtagagatggggtttcaccatattggtcagactggtctcgaactcctgacctcaggttatccacccacctcggcctcccaaagtgctaatattgcaggcacgacccaccacgcctggcgttgtttgttttttggttgttgttttttgtgtgtgtgttttttttttttagaccaggtcttgctctgtcacccaggctggagtgcagtggcgtgatctcggctcactgcaacctgtgcctcccaggttcaagcgattctcctccctcggcctccctagtatctgggattacaggtgggcgccaccatgccctgcgatttttttttttttttttttttttttttttgagatggagttttcacttttattgcccaggctagagtgcaatggtgcaatcttggctcaccgcaacctctgcctcccaggtttaagcgattctcctgtctcagcctcccgaatagctaggattacaggcatgtgccaccatgcacagctaattttttgtatttttagtagagatggggtttctccatgttggtcaggctggtctcaaactcctgacctcagatgatctgcccgccttggtctcccaaagtggtgggattacaggtgtgagccactgggcccggcctatttttttttttttttttgtatttttagtagtgacagggtttcaccatgtaggccaggctggtctcgaactcctgacctcaggtggtccccctgcctcagccgcccaaagtgctggtattacaggcatgagccaccacgcctggccgagtctcattcttctccggtgtaacctgggctaccccaccccttcaggtgtgcagcacaaggtctgtttccaaatatgcacctgtgtgacctgcagccagaccaggccacagaaggacctcaggcctggaggctccctgagctccctgcttccagcatctcatttttgtataaataccctggtcctctcccagttcaccacagagcagtggccccccctgtgccagacagtgccctaaataccactgcctggggttgtgtctcctaatggtgtggacttttgttacagcacatacacacccaccccagcctttcccggtggaggagtgaggaggatacccctatgctggtgtgctctttgtttatggccctgctttcattgttgagtgagcacatggttccgggccctgtccccaagcgctcacagctgagctgaagagatacaacacatcatgccaggatttctagttgttggtgaggcctgggataacctgggcccacttaagccaggatgtgccaggaggacctctgagaagaagcctgctctgcagaaaaagagcaaacacacaggccctgcctcctctccctctgtcctcctctcctgcctctcctgagccatggtccacagtggccttcccaccagacctaccttctgtgctcctgtccaaggcctggtggccccaagcctggcacccactcccttctgtctgcctgggtcagccattcactcactgccagcgtcccaggacatgatgggctggctcaggctgctttttgttctctttttttttttttttttttttgagacagagtcttgttctgtcactcaggctggagtgcagtggcgcgatctcagctcactgcaaggatggtctcgatctcctgacctcatgatccacctacctcaacctcccaaagtgctgggattacaggcatgagccactgcgcccggctggctcaggccccttttaatccatgccgcttctgaagtgacttcaccccacctcctccactatctcccacacccagttctcctgtccccactccctcctgagcctagcaggcagccctttccttttcatcttgtgtctttaatatatttattgaggttccaataccataccacacaactcacccatttaaagtctgtccaatttaatggctgtgagcggtggctcatgcctgtaatctcagccctttgaggacaaagcggatggatcacctgagctcaggagttggagaccaacctggccaacatggcaaaaccctgtctctactaaaaatacaaaagttagtcgggtatggtggtgcacacctgtaatcccagctacttgggaggctcaagcaggagaatcgcttgaacctggaaggcggaggttgcagtgagccaagatcttgcctctgcactccagcctgggcaacagagtaagactccatctcaaaaaaaataataataatatagtgaagtgtgtccaatttattgattttttagtatattcacaaagttgtatggccattgccatgatcagaatttagaccactttcattacccaaaagaaaccccgtcttccctattagcaatcatcccacccctggcaaacactaatctgcttccttctctgtggatttgcctgttctggccatttcctatcagtgaagtcatagaccgtgtggccttttgtttctggcaaattaatatccagcaccaagtgttgtgttttcattttttgatgggcacttgggtcatccacctactctttggctgctgtgaataatgtgagtatggctgccatgaagattcatgctgtacaggtgtttgtatggatgtagattttcatttttcccttgtgaactttcccctaagagagaaaccactggatcatatggtaacttcgtgtttaacattttgaggaactgccaaattgttttccaaattggctgcaccattttgtgcttccacctgcaatgtatgagagtcccaatttctccacgtctcaacaacactgattattttccatttttttgatcatagccaccatcctagcgcatgtgaagcggtatttcattatggtggagttttttaaaattctttttgggtctttttttgctcagttttctggtcattgatcgttgatttgcatatcactgctggctgatgatgtcgaacattttttcatgtgttttattatttttattttttattatttttttcaagagatggggcctcagtgtttcccaggctggtgtcgaactcctgggctcaagctgtcctcccgcctcagcctctcaaagtgctgagattctaggagtgaaccaccacctttgcatgtgtttattggccatttgtatgtctgtctgtgagaaacgtctattcaaatcctttatatatttttagtagggttttttgtttgtttgttcgtttgtttgttttgagatggagtcttgctctgtcgcccgggctggagtgtagtggcacgatctctgctcactgcaagctccgcctcccgggttcacgccattctcctgcctcagcttcccgagtagctgggacttcaggcacctgccactgcgcccggctaattttttgcatttttagtagagacggggtttcactgtgttagccaggatcgtctcgatctcctgacctcgtgatccgcccgcctcggcctcccaaagtgctgggattacaggtgtgagccactgcgcccggcttagtagggttttttaaattattgaattattgagttgtaagattgtgtatacatatgttgtcttctcagctaattgatagtttcatttacagcacaaaagtttttaatttcaataaagtccgggctgggcacggtggctcatgcctgtaattccagcactttggggggcagaggcaggtggatcacttgaggtcaggagtttgagaccagcctggccaatatggcaaaaccccatctctactaaaaatacaaaaattagctgggcgcggtggcgggcacctgtagtcccagctactcaggaggctgaggcaggagaatggcgtgaacccgggaggcggagcttgcagtgagccgagattgtgccactgcacttcagcctgggccacagagtgagactccatctcaaaaatacatgtataataataatttcaatgaagtccaatttctgtatttttccttttgtcacttgtgcttctggtgtcatatctaagaaacctagtttgaggtcacagagagtgacttacattttcttctaagagtattatagtttcagctcttacgcttaggtctttgatcctttttttttttttttttttgagatggagccttgctctgtcacacaggctggagtgcagtggcgcgatctaggctcactgcaagctccgcctcccgggttcacgccattctcctgcctcagcctcctgagtagcggggactacaagtgccagccaccacgcccggctaattttttgtatttttagtagagacagggtttcaccgtgttagccaggatggtctcgatctcctgacctcgtgatccgcctgccttggcctcccaaagtgctagaattacaggcgtgagccactgcgcccggcaggtctttgatccttttgagttaatttttgtggatggtataaagaaggaacgcatcctcattctttagcatgtggctgtctggttatcccatttgttgaaaagactgttttctctcccattgaattatcttggcacctttgtccaaaatcaattgaccataaatgtgagggtttatttctggactctcagttctgttccattgatgaacatctctgtcctatgccagtgccacactgtcttgtacacacagctgtgggataagttttgaaatactgaagtgtgagtctttcaactttgttctttttcaaaattgttttggctgttctggtcccttgcatttccatatgaatttcccaacctgcttgtcagtttctgcaacaggaaaagaaatggttgggattctgatggggattgcgtttcaaatctgtatcagtttgcacagcgttgccatctgcacaatgctaagtgctccaattcttgaacacaggatgggtttttatttattttggtcttctcttaagaatggccaaggccgggctcagtggctcatactggtagtcccaacactctgggaggctgaggtgggaggattgcttgaggccaggagttcaagaccagcctgggcaacatagcaagaccctgtttctatgaaaaatatatttttcttttttttttgtttttgtttttggttttgttttctgaaacaaagttttctctgtcacctaggctggagtacagtggtgccatctcagcccactgcaaccttgacttcttgggcttaagtgatactcccacttcagccacccaagtaggtgggaccacagatacgtgccaccacatctagctaatttaaaaatatgtattttgggccgggcatggtggctcatgcctgtaatcctagcactttgggaggccgaggaagatggatttacctgaggttgggagttccagaccagcctggccaacatggtgaaacctcgtctctactaaaaaatacaaaaatttagctgggcacagtggcgtgcacctgtaattccagctattcaggaagctgaggcaggaaaatcacttgaacctgggaggcggaggttgcagtgggctgagatcgcaccactgcactttagcctgggctacagagcgagactttgtctcaaaaaataaaataaaatacgtattttgtaaatgtttcactgtgttgcacaggctagttgcaaactcctagtcaagtgatcctctcacctcagcctcccaaaatgctgggattacaagcgtgagccgaaaaaatttgatcccaccactgcactccagcctggacaacagagagaggcccggtctccaaaaccaaaaacaaaaagaatggtccacacacccttttgtgcgtgcccctcaccatgttccccaccagactagcagttcctaaggcacagactctgaggcctggggccttggcccccctgtggttggcgaggaggaagagccctgtgcaggctgcatgcaaatacaagaggccctgcattgtttctgtcatctcatacatctctgttctatgccagtgccacgctgtcttgtacacacagctgtgggataagttttggaatttatttcttctttggaatttatcttacagatgggcctgcgtatgagtgcgcaggtgtgagggtgcaggttctccccaagggcccattttctgcaccagaaggctgagggcagcccaggtctgtcccctgggttctctgtagccgtggaaaataatgagatatggccgggcacggtggctcacgcctgtaatgccagcacttgcaggtggatcatgaggtcaggaggtcgtaaccagcctggccaatatggtgaaaccctgtctctactaaaaatacaaaaattagcctggcgtggtggtgggcgcctgtagtcccaactactccggaggctgaggtggaagaatcgcttgaacccaggaggcagaggttgcagtgagccaagatcttgccactgcaccccagccagggcaacagagtgagattccgtctcaaaaataaattaattaaaaaaaagaaaagaacgagatatgaccagcctgggcaatatagcaagaccccatctgtacaaaaattagttaactggacatggcacacacctggggtcccagttactcgggaggctaaagtggaaggatcacttgaacccaggagttggaggctgcattgagccatgattgcgcccctgcactccagcctgggtagcagagtgagaccttgtctcaaaaccaaaaaccaaaaaaggaaaaaaaaatgaacaaggcagctgatgaaacctcccatgtgctagacaggaggctgagagctgggagctggccctgagcaccctgggcctctccagagatgtgcctctgagcccggacccagcacaccctcattacctgtagtatggaaatgtcttagccctgacttgggcttctaacaggttaaataaccaggtacaaatttgagccagtttctcatttatctccgggtctagcagaggtgcccccgtgagctccatgctggagcagagctgaaggcagaagagcatgacaggtgcagagcagggcccggcaggcacagagtagccccagcaggcatagagcagggccagtgccctggaggcctggagatggccttgccttccacctgctggtcatttcctgggtgttgactggagcctggcctacctgagcttttcattcatcccaccaagtgcaaagcctgtccagagaagagactggggctggaaggatctggagggtgcagggtgagcctgggagccagatcccagacagcccaggcctctctgaagatcccagtgggcccccagcctgtcagtcaggattagagcaaggccccactggtgctcagtaaatattcatgatggcctaggtccttcctggggtgcagggcagggggcttcaccctgcagagccaagaggtagcacggccacccctagagtccggggggtggctgggcagcccccacagggcactgcctgtccctggcagctgtgtgcagcccccgcagggcagcacgcggaactgtggcccaggtggccgggagccaccatggacactgtcagaactgcccttccacttcagggccagcctgccgcccagggtccaaacagccttctagaacacgatggacctggggcccccctagcaaccaccatctagaccctcaggcctcctgaggttgctgcctggcttgtacctttcagaaaacccctggcatgggggcagaggtgtcacagtccaagcagcctcactcctgagaagccgccagtgtcccctgattgcagagtgggcagcgcctggagctgtggaggagggtgtctgggggcgggctggcccgctgagcagcgcctctcttcacaggctacagcatgctggccatagggattggaaccctgatctacgggcactggagcataatgaagtggaaccgtgagcgcaggtagggcccctggtgggcgttgtctgaaagtgcccccccggcgagttgtcggggtcctgtagcattccgctgttgtctgtgctggcgaggggtgaacgggccccttggacttggctgtgcaatcccaggccccagaaagtgcagatccagacccagcacttccacttctaggctctgtcctcgagatgtctccatgtctgcaatcccagcactttgggaggccaaggtgggagcattgcttgagcccaggagttcaagaccagcctgggcaacagagggaaaccctgtcctcgccaccccaaaaaatgtgtctagtgaggagggttgggacccgtggatccagattaggacaggatatgagtggggggcctgcctcgggccctctaagcaggattttgtcagaggtgaccaggctcaaaccagaccacaccaggcagtggacacacagggccagatgaactagggccaggcgcccccctctccctgtgtcacaggctgggcactccttccccacccctcccccaaccccaacgcaggccaggcaggactgggagatgggggtcattgcagggaacttggaaactgccagaaagcagggagaagaaaggaaagattgtggccccgcctgccccagcctcacacactgattattttgagatgaaggggacgtggttttgtgaggcccagagccccgtgatgaagtcaccccctcttcgtcgcgatcatcaggcagagttatttttaggataaaaaaagtttttaattgaaaagaaagtagaaagccaacagtcttgtgggcagtcacccgtgcagctgcctgcacccgccctcctctcaggctcctggtgggctctgcccacagcccttgcccttcccgcgaccctcgccctgccccctgcctgcctccccgcccccctccgcctcttcccccagcagcaccctggcccctgaggtctgtgctgcctgtgctcccccgacctagcctggtctgacctgagtgtgggtttcgggctttcacaggcgcctacaaatcgaggacttcgaggctcgcatcgcgctgttgccactgttacaggcagaaaccgaccggaggtagcaccgcaggggccaaggttgggaggtcactggccggaaggccccaggctgcagggcctgacctgcatccccgaaggtggccagaatgcacgtgggggccatcgccctgtgccgtcagctgcatcctcaggcgtggagacttagtggagacccaagggggcgaaccggaaggcttcctggaggaggaggcagcactggggttggggcaagagaaaagctaggagttggctgggggaaaaggagacagggtcggagggaggcttgaaggggtgctactaggggccctaggcaggggcccctcagggcactgaggccccacccccaccatcggccccatccccacaggaccttgcagatgcttcgggagaacctggaggaggaggccatcatcatgaaggacgtgcccgactggaaggtgggtcccggctgggagggcagaggtgccagccacggcagagacagggcctggggttggggagctcccacagctttctatagaaaccccaggaccaagggggtggtgggtgccaggtcccacaagggaaggctgtagcgcctgccacgcacaggggccactgatcctgggggatgggtcctagcaggctgtatatgggtggctgtgcctctacccataccccactgtccccacaggtgggggagtctgtgttccacacaacccgctgggtgccccccttgatcggggagctgtacgggctgcgcaccacagaggaggctctccatgccagccacggcttcatgtggtacacgtaggccctgtgccctccggccacctggatccctgcccctccccactgggacggaataaatgctctgcagacctggcctgcctgttttcctggggactgggggaaagaagggggagagggcccagctaggcaccaccggatcacatgtagcatggggacgcagcagatatgcacagggtgacctcaaaacacacctaggggctgcccctggatccactggcggcctcctctctgcctccgatatacctggactctcctgcctcccttttgaaaccatgcctgtcagcagcccacttacctctccaggctgggggcccctgggtcagctttgggtcagaccttctccacggaggtctggagagtggggggagccttgacctcccggatacaagtgatcctcccgcctcagcctcccgtgtcactgcgattacaggattacaggcgtgagccaccataccttgtgcagccctgccaattgtaggcatggcgagggtatttgtctgcggaggggctcctcgctccctgagagggaagctcagagacacggggatatctgcagggaaagtaagtcgggggaagcaaccaagattggccaggtgcctctgctgtgggctcctggcacgaaagggtgaagtccgtctgagtccaccgaccaatggtgacgcgcagcgccttcgcggcgcttcctgattggcgggcatgcagggtgggcgggagggaggagaagagggggcgtcccctccctccacggatgcgcttaaaaggcggtggcggtggcggcagcgcccggcgcccgggctcacctcggccatgagcagcgcagccggcccagacccgtcggaggcgcccgaagagcggcatttcctcaggtcagctggggagagggaagctggagacgggcatggttcccatggggccaggagcagcccgtaggaccggaggcagggtcatagctgggacagaatggggtccggggactggagacgggcacagccgggatggaggttcaacggcagaggcatgaccacggtggggaaccggaggcagggatatggccaagacgggcctgggaatcccgggaatccgagaccctcctggcatcttgctggagacactaagctgcgttgctggggaaactgcctccggggcagcccgcccctcatgaatgattcatcagcagcgctggtcgctcccccaccgaaccccaaccgtggcccacccccactctccatctctcccagggccttggagctgcagcccccacttgccgacatgggaagagcggagcttagctcaaatgctaccacctcccttgtccagaggaggaaacaggcctggggaaggcagtcatggctagagcagatttggaacgcagggcctgtttgccagaggttggtgagtttgggatctagaactggcgccgtggctgtgactctcacctcatcctcctcagcctttgtgacatgggaccccaggcaaggctgttgacctcactgtgaaccagatgcgtccaacagctcctgcccactgcccacctagcagggcacgtgtcccctcagccgatgtccagactcagtctagggaagagtgttttaggagctgtgacttcaccttggggtgaaggggtgaggtgaggggggcctcaaatgctaagtgaggggagtgagggggctctcaggggtgggtaggagctagaacgtagtggggaactggctgacgaggctggagacacagaagggcctcttaggcatggtgaggagtttggagtttgaatgttcccagagccctcgggagccatcagcaggtttgggacccggtgatgcaatctggtgttcgagttttcaaagcccccccaggctcatgttgagttttgggggcaggaggctgctgtgtgcggccaggtgatcccccgtggtggtctggtgggcagaggtgtgaggtggagagaagcaggtaggactgagagcagggtgagtgtggcatggccaccctggcctgaggtttcacctcccagaaagccccctcctggaagcatttggcgagtgtcaggcccagttccctttggacccaggccacttcaggcctcctgggtctgacagggaaatccttggggccttgaagcttctctcatctaggggccgagattcgggatagcaaaaggcaccactgaacacccccagaatcccacaacagcagaagggacctgccctgcctgccaccctccttcaccaggctccaattcccacgcagcctcccacccccaccccacagctgctgctgtgccccacccccaggttcctaacctggacgaccctctgcccacagagcccccattattctaatgaccagttagacaggaagagaatgttccaagtggctgctagaggccaaagctttgggacagaagaagaggaatgcatcgccctcccgccctccacttcctccctgcaccctcctgcgggggcagcagtcagagctgtcacaagatggaggtggaggaatgagccatgttcccagcctgccagattcctcaccccgaatgcaaacgcacctcctatgtgctttcctgggagctgcgctggcctgccccggggggactctgtctgacttcaccatgagctccttttcctcaccccgtccttcaacttcatcctatgtcagctgcagacaggctgaggtttgaatttggctctgtttactggggtgtcccagggcatgtgactttcctgccctgagtctctgtctccgtctttatgtgtggacccccgaagtgtcctcttcaccatgttcctcagtctgggatttgaggctctgcctgccctgtccgcttgatcactctgcttcagcctcccttctgccccttgaacataccaggctcctccccaccccagggccttggcttttgctattcttgcccctgcattacctgccacgatgtgccaggcctcctcctccaggaagccctcgctgactcccatcccatagcagtcctccttctcctgcactctgcctacctggccttatcatgctgcaaaattggccagagggcagacatctcccactcagagagttgaaggaaagagtctcaggattcatcccctcaaaacatccaccatctgtaggtctggctctatgtctttgttcatgtcctgtggctctggagacaccaagggggaaagacccagtttcccaacttgcttcctgcatgatcctgggcaagccactcggcttctctgaatcattagttgtttttccaacttttctaggcctggctctttttatttatgtttgtgttttttattattatcttagagacaaggtcttgttctgtcgcccaggctagagtgcagtggcgtgatcatagctcactgcagcctccacctcccagattgaagtgatcctcctgcctcagcctcctgggtcaccgggattacaggtgtccaccaccacgcccagcctagtctgaccaattgtgtaggtcacccgaatattcagttttgctccgagaggtggagacggaccccagtcattcagtgaagtggatggcagagcttcacctccagctaagtagccacattttctggcaacaaataaccttttttttttttttttttttttttttttttggagacggagcctcactctgtcacccgggctggagtgcagtggcacgatctcggctcactgcaacctctgccacccgggttcaagcgattctccaggttcaagccttagcctcctgagtagctcgtactgcaggcacccaccaccatgcctggctaattttttgtatttttagtagaaacagggtttcaccatgttgggcaggctggtctggaactcctgacctcaagtgatccacccgcctcatcctcctgaagtgctgggattacggatgtgaggcaccgcgcccggcctggccacaaataatctaattatgtcactgcccctgaaaatcggtcaccaaagggtctcatagccccaggccccaaggcctccccgctgagtgtgccatcaaacactgcagccttaaaaacccatggaccccagatgcccccagtcctgtccacccctttcagcgtcctgaagcttgttccgtggctcccactgcctgaaatcagcccatcgcccccatcgaagtccttcatgctccattcccctttcttggttccctccgccttgggagctggggacgtctaggtccggttccgtgtcccacgctttggagcagtagaaccaacgcgcggccagcgcatcttctgccaccagagggcgcccgcgcctcgggctttggctcccacaccgcggcccgccaggcctcgattcaacccgcgcgtcgcacggtgaaactgagggcatccccagctcaaggctgcagacgctactcgggggtacggggtgggagggtggcattgggaccgggttcagaagcttggcggaacatttctggctccatctgaggctctgtctctgtgtgtctctgagtgtcccatcccactctgtccccagcaccgcggaggcagccgccctggagcgggagctgctggaggattatcgctttgggcggcagcagctcgtggagctgtgcggtcatgctagtgccgtggctgtgaccaaggtacctgacccctgacccccaaccctgaccccaaccagacggccaactctcctgagctgcatgactgctgtgaccagggtggttcacccctcaagaactccctttttgcttgggcctaccccagcctgatgggtaaactgaggcccagagaggctcatggctggtgcaggccagatggggacctgagacccctggtatcagagaaggccagggtggaggttattgcagggacagtgccacgaccctggaagtgcaacccctcctgcacatgtgacccgcctgcttctgccacctcctgggtcttgggcaccagggacatctgctcctgcgatctgaacacccctaaacaaccctgttctgcaggtggggaaactgaagctcagaggtggcgaggggcctgccctgggtcagagggggatggaagcagagctgcaacccaggtgtgtctggctctggagtaaacccccacacctcgaggggccaggaggatgacacaagggtgatagcaataatcatactatggagtgcttcaccgtgcagccagcagtgctgggcatcagtttcctctgcaacagcataataaatggtactgacgagtcagtccctaaacgtgaacgcctcagaaaactgtcccatacagtcgaggctctagcgtgactgcctcctcttcctcccctgccctcctcatccccctcgcctttctcctccttcctcctcctcctgccccctcctcttaccctcctcctcctttctctctccctcctcctccccttccgcccctttcttctctcctttctccttcctctccctcctcctccccctcctcctgttctccttcctccttcccacttaccctacctcctccccatcctcctcctccccattctctccctcctcacccctcctcctctttttcttcttattaccacggtatactttttaaaaactcaatgtttttcttcatgtggacttaaatgtttgtatttccaaatgaaatagatcccgggtgaggcgcccaaaggagaaggaaaatcaaaaccccagaaagaaacccagtagtcactactcgcctggcgctcagtggccaactgtctggtttttgcactgaaagccccttgtctgtccagaagcccctcagtcccagtcttgggtcttgggctctgggcccggtgtggctgggatcgcaggcatgttcatggcaggtcaggactgcgctaagcctttggggaggatacttgaaaggggagtaatctgctgtctgtgtggttggagcttaaagtacagctggggctcaagagacacccagagtgcctgtcaggcggtggcactgtcatcgcatttgataaaggccaaactgagtctgggagagaaggggctggggccacgcagaatcagggcagggctggggccaaaatgcctggagagacagagtctgagagatacagagatggccagagacagatggagagagacagataacagagagatacagagacagccagagacaaatggagagagagacaaatggagaaagagagccagagacatacagaaagacagagacactagagtctgagagatacagacagacacagagacagccagagacagatggagagagacagagacacaaagagagccagagacacagagagtctgagagatacagacagacacagagacggccagagacggagagagacagagacagacagacagagacacagagagtctgagagatacagaaacagccagagacaggtggggagagagacatgaagagagccagagacatacagagagacagagacacacagagagacagagacacggagagtctgagagatacagagagacacagagacagccagagagagacagagaggccccagggcatcgtggctaaggttgggctcccctactccacagcctccaggaggggctgaggtctggaaacatgggcgggggtgggcccgcggtgagaaaggtggaagaatgtctgcaactcaggcggagaataaacaaaccgcactccgggcgacgggcagtggctggatgcacgtttttcctgcaccgacctggcagagcctgagaccgggcctctgcatctccagcggggaaactgaggccccaagaggcccaacccctcatccagaacagctcacctcctgtcctatcctgttgcctccaggcccaagccccatcccttcccctactccgggcctcagtttcctctccaggcaaggaggaatctggactgtgcctgtgcctttgctgtgtcccctaccaccaggcgttcccgttgcccgctctctcccggaagcagaggacggtgctggtcgtgtgtggcccggagcagaacggggcagtggggctggtctgtgcccggcacctgcgggtgtttgtaagtagcaaggaccccttcgacctcccaaagtccctgcccctgcagaaatcactgccttcttttgatagcttcccagggggacattgacgcagggccaggttatagaatatgcccagtgcttgtcccaggcagggtctggtgctggtgaccaggtcaggggagtctgaccccctcttctcccacccccaggagtatgaacccaccatcttctaccccacacgctcgctggacctgctgcatcgggacctgaccacccagtgcgagaagatggacatccccttcctgagctacctgcccactgaggtcagcgctgggtggcaagcaagggggacatggtgtgcagtggccctgggccaccctgaccctgcctgccttccccaggtgcagctcattaacgaagcctatgggctggtggtggatgccgtactgggccccggcgtggagccgggcgaggtcgggggcccctgcacccgcgcgctggccacgctcaagctgctgtccatccccctcgtgagcctggacatcccctcaggcatgccaggcagaggggggcacattggggcctggggggcttgggtggaggcccctgtgccccagctcctggtcgcccctgcctgtctgaacctcaatctccccagcttggatggacccacacttggctgaggctaagggtcacacccatccctctgatggggaagatcgaggctgccaccccaggtgaccccaggtctcctctttcctccaccccagtgcccagcccacatgccctctgcccacccctggcccagttgcctgggcagacgtgagctcactcggcaaaggccgcgcccgccctggctgccgccccatgcctgttggaaccattaggcgacaggcagacggaacaaacagccgctggccagccggaccctccgtgggggtggctggactccgggggatgtcccctggctctcgggatcccagggacatcccagcaggtgccacagagcaggggcaccaagggaggcggcgtgctgtctgatctgagtagggaggctgcaggctcagcctaggacagagagggtggctctgtcaggtcagaggggatggttaggaacctctagtctgagggtggtggctagggtcagagaaggattaaagtctgagggaggatccagtgtcttctggtgagtggccccagaatcaagtcagagataggagagaaggcaaggctcctaggctgaaagtggaggctcattcaagaggtgacggaggctgggtgcaggggtcacacctgtaatcccagcactttgggaggtcgaggtgggcgggtcacctgatgtcaggagttccagaccagcctggccaacatggcgaaacccagtctctacaaaatacaaacatttgctgggtgtagtggtgcacgcctgtagtcctagttacttgggaggctgaggcaggagaatcgcttgaacccgggaggcagaggttgctgtgagctgagatcgtgccactgca

SEQ ID NO: 395 - DNA, 24759 bp, Homo sapiens
  source 1..24759: mol_type = genomic DNA
cagggctaagcaggcgccagggagcaagcctgggcttgccacatcaccaccttctgtgctgaaggtcagatgacacacagtcaccagttttccgagaagcacagggaggggtgcatgtcaggcccagccctgcctgctgataccacctcacagacgcaggcgaaatgtcttcaccagcttcttctcggttgccaagggggcctgctttcaaggggttgttttgtatggggtgtgggtgttaaccagggagaggttcctggcaggagttcctgtcagatgccattttccattctggttacttgaaccggggtcctttttcatcctctacctcaggggccagagcttcctcatcaccctgcaccccctagcaagggaggtgcccgctacacggtccaaagtcctctccagacattcgggccctgcccgccttgctggagggctcaggagttcaccaggtttgcttccagaagagccaggctggggatgcctgcttgcaaatgcagcaaataaaaaataaataaataaataaaaatcacctttctccccacccccacccaaatgtaaaatgagccgacagcctgtccctcggctatgtcagatactgctttccgcacaatatcttggttttacattattttgcaacggcctcttcccacttaatccatcctgaacacacttcttgaatgttctaccccggcagggatgcgcattctcaggaaacacgtcccctcgccaggcccctgggaagagtcaaaaccacgatgcctgcccctgaagcgcccgcgcggctccacggggctccatgttgtcacccactagctcctggacgctatcagcccgcagcagggtttcctggccagagaaaccgcctgttggggtgcggagcgttccacgtcccctcgcagcaccccgctggccttctgggccgccccgcccccaacccgcgcccgggcgctgacgtcatcggccgagcccgactcggaaccaccgcccgaaagtcacgcgcgcctcccggcgggacgtgccctctgcagagatccctccgccgccgcctggaattttccagatgtcctgccggcccttctttcgggcctcggctgggcgtggtgacctcaagcgaccccggcggctcccgtcgcccactcaagagggcgcccccgcccgccacgcccccagcccctctcggggaagcgcgtcccccgcccgacctcaacaacatccgggaagaaaaggggtcttcttcctcatggcattcgcctcccaaatgtcaccttgagcgctgtccgcgatcccaaaaagcactgttaaagagaagcggggatacactggggtccttgcgtgggggccgcctgggagaccatgcaccgcccgggagtctctccgggcagggtcggggagggacttttttgccggtggccgtggaggaatcgtcccgttgagcaatgaccccggtgacgcggctgagggctataaaagcaaaagttgtggcaagtccagccggagttagcgacagggagggatgcgcgcctgggtgtagttgtgggggaggaagtggctagctcagggcttcaggggacagacagggagagatgactgagttagatgagacgagggggcgggctgggggtgcgagaaggaagcttggcaaggagactaggtctagggggaccacagtggggcaggctgcatggaaaatatccgcagggtcccccaggcagaacagccacgctccaggccaggctgtccctactgcctggtggagggggaacttgacctctgggagggcgccgctcttgcatagctgagcgagcccgggtgcgctggtctgtgtggaaggaggaaggcagggagaggtagaaggggtggaggagtcaggaggaataggccgcagcagccctggaaatgatcaggaaggcaggcagtgggtgcagggctgcaggagggccgggagggctaatcttcaacttgtccatgccagcagcccctttttttccagaccaagggctgtgaacccgcctggggatgaggcctggtcttgtggaactgaacttagctcgacggggctgaccgctctggcccagggtggtatgtaattttcgctcggcctgggacggggcccaggccgggcccagcctggtggagcgtccaggtctgggtgcgaagccaggcccctgggcggaggtgaggggtggtctgaggagtgatgtggagttaaggcgccatcctcaccggtgactggtgcggcacctagcatgtttgacaggcggggactgcgaggcacgctgctcgggtgttggggacaacattgaccaacgctttattttccaggtggcagtgctccttttggacttttctctaggtttggcgctaaactcttcttgtgagctcactccaccccttcttcctccctttaacttatccattcacttaaaacattacctggtcatctggtaagcccgggacagtaagccgagtggctgttggagtcggtattgttggtaatggtggaggaagagaggccttcccgctgaggctggggtggggcggatcggtgttgcttgcctgcagagagggtggggagtgaatgtgcacccttgggtgggcctgcagccatccagctgaaagttacaaaaatgcttcatggaccgtggtttgttactatagtgttcctcatggcgagcagatggaaccgggagacatggagtccctggccagtgtgagtcctagcattgcaggaggggagaccctggaggagagagcccgcctcaattgatgcctgcagattgaatttccagaggcttaggaggaggaagttctccaatgttctgtttccaggccttgctcaggaagccctgtattcaggaggctaccatttaaagtttgcagatgagcttatggggggcaatcttaaaaagtccacagcagatgcatccggctcgaggggccatcagctttgaataaatgcttgttccagagcccatgaatgccagcaggcacccctcctttcctggggtaaaggttttcagatgctgcatcttctaaattgagcctccggtcatactagttttgtgcttggaaccttgcttcaagaagatccctaagctgtagaacattttaacgttgatgccacaacgcagattgatgccttgtagatggagcttgcagatggagccccgtgacctctcacctacccacctgtttgcctgccttcttgtgcgtttctcggagaagttcttagcctgatgaaataacttggggcgttgaagagctgtttaattttaaatgccttagactggggatatattagaggaagcagattgtcaaattaagggtgtcattgtgttgtgctaaacgctgggagggtacaagttggtcattcctaaatctgtgtgtgagaaatggcaggtctagtttgggcattgtgattgcattgcagattactaggagaagggaatggtgggtacaccggtagtgctcttttgttcttgcttcgtttttttaaacttgaactttacttcgttagatttcataatactttcttggcattctagtaagaggaccctgaggtgggagttgtgggggacggggagaaggggacagcttggcaccggtcccgtgggcgttgcagtgtgggggatgggggtatgcagcttggcactggtactgggagggatgagggtgaagaaggggagagggttggttagagatacagtgtgggtggtgggggtggtaggaaatgcaggttgaagggaattctctggggctttggggaatttagtgcgtgggtgagccaagaaaatactaattaataatagtaagttgttagtgttggttaagttgttgcttggaagtgagaagttgcttagaaactttccaaagtgcttagaactttaagtgcaaacagacaaactaacaaacaaaaattgttttgctttgctacaaggtggggaagactgaagaagtgttaactgaaaacaggtgacacagagtcaccagttttccgagaaccaaagggaggggtgtgtgatgccatctcacaggcaggggaaatgtctttaccagcttcctcctggtggccaagacagcctgtttcagagggttgttttgtttggggtgtgggtgttatcaagtgaattagtcacttgaaagatgggcgtcagacttgcatacgcagcagatcagcatccttcgctgccccttagcaacttaggtggttgatttgaaactgtgaaggtgtgattttttcaggagctggaagtcttagaaaagccttgtaaatgcctatattgtgggcttttaacgtatttaagggaccacttaagacgagattagatgggctcttctggatttgttcctcatttgtcacaggtgtcttgtgattgaaaatcatgagcgaagtgaaattgcattgaatttcaagggaatttagtatgtaaatcgtgccttagaaacacatctgttgtcttttctgtgtttggtcgatattaataatggcaaaatttttgcctatctagtatcttcaaattgtagtctttgtaacaaccaaataaccttttgtggtcactgtaaaattaatatttggtagacagaatccatgtacctttgctaaggttagaatgaataatttattgtatttttaatttgaatgtttgtgctttttaaatgagccaagactagaggggaaactatcacctaaaatcagtttggaaaacaagacctaaaaagggaaggggatggggattgtggggagagagtgggcgaggtgcctttactacatgtgtgatctgaaaaccctgcttggttctgagctgcgtctattgaattggtaaagtaataccaatggctttttatcatttccttcttccctttaagtttcacttgaaattttaaaaatcatggttatttttatcgttgggatctttctgtcttctgggttccattttttaaatgtttaaaaatatgttgacatggtagttcagttcttaaccaatgacttggggatgatgcaaacaattactgtcgttgggatttagagtgtattagtcacgcatgtatggggaagtagtctcgggtatgctgttgtgaaattgaaactgtaaaagtagatggttgaaagtactggtatgttgctctgtatggtaagaactaattctgttacgtcatgtacataattactaatcacttttcttcccctttacagcacaaataaagtttgagttctaaactcattagaattgttgtattgctatgttacatttctcgacccctatcacattgccttcataacgactttggatgtatcttcatattgtagatttaggtctagatttgctagctccaagtaattaaggccatgtaggagagcatggtaaccacagatagaactggtattatcccaagtggtctgcagactgctgagtggggatgggatctgctctctgttgagagttggtaatcattggtttgaaatgtgatgaaaccactcaagccaatgaaggtgggtgtgtaggtggggagtactttgccataatattttaaaacattacctggttagagttctaagtggtacttatttttgtttggttaggggaaagcctgaataaaaacagaaatggacacataatatgcatattccatagtctttgggaggctggaatgtgcctgggatttgggtctaagtgtatgcgtaattcttacctcactaaagaatttgccttgtttttttccttttggtgagtgactaaaacgtctgggcttccctgtgtgcgtgctacagtaagcaagcagaggctgtgcaaaggtgtgagcaggatcacgtggaatctggaggatacatcttggcttgcaaactgcctctgtctcctgggtgggactgttctgtccttgcactgctgttctgtgttacctcttggggtgtaaggttttgcttacaggagacaaactttgggcgtagaatggaagccactgccagcctctgtgctgagaaggaaggtgcttgtttcaaagggagcagcaagggaggcttgttctactcacctgggcctgtttgcctgagaaggggagataagggctgaactgggactagccagggggaccaacacaaatggtgggggatcatgacctgaaggattctttccttcccatgagctgcagggctggttgccgtccttgcaactgtgtcttatttgcctgtgccgttatatcttggtgacccctccacgtgtacactactgacaaacgggtggagtgctggggagaagtcactgtgccgcccacctagtaaaccttctgtctgtgctcatggcatctccaagatggggcactgctgtgtgcagaatccagggtcctctttctgcttgcaactcctttccctggatgccccagaaacaatccaggcctcctttcctatcttacccctttgctttgctttttaccccagcacctctataaccgccttctcttcttttcagaactccttgtttctcgtcctgttttttatgattacaaaactcttgcttccaccctggaagataactgctatagatgcctgtatgtaaatggtgctgtctccagcaactggcatgctgaagaagaattgattcacggggtataaatgttggggattggaagtggggatgaaatggcacttgttgatacaggagcagagaggtgaggccgactgctgaagacagctcgccaccctccttgcctccactccaatccaggggctggggccacattctttgccttcatttatcctcagatcaggtgagatcgacaggaggtgttgatggcagtgccagcaattattgctaatccgtttgcatccttatgcatagatctgaattcagactttgtgaatttccagaggtgtgggtaatataatagaattcagtgagtgggcatggctgatcttgtgcaaattaaaagttatggggcataagaatagcaaaagttgaacttcttttaaaaaggaaagtaccctgagagccagtattggttgaggctcttcagtatgcccaggttggcagcactgagaaccgcaggaacggcctgttgttacaaaaaggagattgactcagctgcccttggtgcatctgactgactatgactgctgagagattccaaggacccttaatgccagggctaacctctccatgtgcagtgagacctctggaggaagtgtcatcctctggctttgtgtggtactcattatggtgcagtgcgggcatgaaatgaagacacccaaataggcttacagatacgatatgttttaaatgttcgtatttaacaaaaacatactgacactgtttggaaatggcaacaggaagatagcaaaatgaatactaacattacgaaaagatgaacaggtacatgttccaaggcaggtggctgtgaacttcctctgagtgaaggcatcccctccagcacctttcagcctgctagttaggacgacccgccgccaccctccaggacctccagccctgcactgcctttcctctcttttaaataattcttcattgagttctaatatgtaaaaaaaaaaagtttactgtaaagtttgcaaataaggaaattttttttaaaagtcctcagtaatcttaccagtaacaattgttatgggcacatttgcttttggaagatttcttttgtatgcatgggataagtacatttttaaacaaaaatgggattatgccataaattctattttgtgactttaatatatagtgaacaccttttttaatgatgacaggatgttcccttgcatggctgtatcaatttaaacaatcttgtttcaatgggcatacagggtattttctagtttttttttcctcttagaaaataatacttgcgatgactttccttgtagctcagactttttcacgtctgttgttatctctttgggaatgctgaatacatacatttcgagaaggaaatgactgttaaactcttaagacttcaggttcatattgctaaactgcccagcagggagggattttttcaattagtgttctcactggtgaggcaaacctgatgccttcccctcttcctcagaaccggctttatcacattgaaaacctttgctcctccgacggatcgagtctgctttccctctggatgtgagcattgctttgtctgctggtgactgaacatctctaccttgtgtcaattggccatttgtggtgtgtgtgtgtgtgcgtgtgtgtgtgtgtgtgtgtgtatgattttctaattcctagtcatttttctattgattgttttgcaaaagccatttacatcttaaggatattgataatcttttgttatatttgatgcaaatatttttttccagtttataggttgccttttaattttgtgtttcaggtagataaaagttaaacgattttcttaggttagtttatcactgtggtttctgaacttgttatgtgtagatcttttccaccccaagagtacataaatattaatccatactttcttatggaacttgtatggtttcgttttttacatttaaaccttcttccccgtggtgtgtgttgtggaatctgtgtttgtgtgaggaggggcatggtgctctcagaacccacctcctgtggccagagagccctgtcctgtgagggtggttgtcacagtggcagggttcaattcagaagaccttgagggcaggctgatgtttcctgaatgggcccctggttgttgcttgtccctgactctccatttccccatctgagtggatttggacctaatagggcactggagctggttcgaatcctgactggactacttggcaactttatgtctgggagcaagttacttaacctccccaagcctgtgtctgtgaaatgcgggtaaatgaatgtagatgtttggcagcagctactccttgttgagctctcacagtgaactctcctgcctctgccctccttccccgcctcccctggtgcctagcgtcaggtctagccacttcctcctgggcccctctcccttttctgtggctggctgcctgcccgcctggcgctggacctttcatgtaacgggaatcagcatgtatattctggtctggtctgtttctacacttaattttgtttccagtagtatttccctgtaccggcagagttcacaaacacatttgaagaggctttttctcaggattcttaaccttcccaaaggaagtcccatggatgggtttctagaagtctataaatgctctgaaattgtatttttctgtggaaagcataactttcatctgcttgttcgtgctcaaaaaagatcatgaatgaatgattgcatgattttatgccattgtgcttatactaaaggatatgtagcccatctcttgagctgttaaactgttttgactactttaaatcgtgcagctgtgagcatctctgtaaatttagtgtacacatgtatcccctggagtggcattgcctcggcagtgagcacttatggttttataactctcttcacagactcaaatgactccagaaagctacacttcctgttgtgagtatatgatatccatttccctacatagccactaacatcaggtttttacaattttatttatttcttgctactttaagaaatttttgtggtgaaatacatataatagaagttgactatctgaatcatttttaagtatacattcagtagtgttaagtatgtcgccattgttgtacaaccaatctccagaactttttcatcttgcaaaacaaactctgtacccattaaataacattaaacattccattccctccagcctcagcaaccccattctactttctgtttctgtgagtttgactattccaagcacttcatatcagttaaatcatgaagtatttgtctgtctgtgactggcttatttctctgagcacagtgtcctcgagatgcgtctatgttgtagcatatgtcagaatttccttcctttttaaaagatccaaataatattcttattttatatcttttttttatccattcatccattagtggacacttgggttgcttttggctattgtaaataatggtgctatgtacaaatatctatattattgtatttacaagtataatgctgtaatgtacacacatctttttgagatcctaccttcagttcttttgagtatatagccagaagtggtattactaaatcttacgatatttctatttttaatttattgaggaaccactgtagtttttcatagcaactgcaccattttacgttctcaccaagagtgcacaagggttccgaggttcccacatcctccccaacacttgttattttctgctttttttagattgcagccatcatagtgggtgtgaggtgacatttcattgtggttttgatttgcatttccctaatgaggagtgatgctgagcatcttttcatatgcttactggtcatttgtatgttgtctttggaaaaatgtctattcaagtcctttgactattttaaaaattgggttattagagttatcgttgttgttgacttgtaggagtttctttctatattctggatattaatcccctatcagatatatgatttgcaaatatcttctcttattccataaggttactttttcactttgttgattgtgttctttgatgtatagaagtttttagttttgaaatagtctaatttatctgtttttacttttgtggtctgtgcttttggtgtcatatccaagaaatccttgccaaatccaacgttataaggtacttttaaggtattttagttgtcttagtctatatttctgtactcacctttctttatccactcatcagttgatgggcatgtaggttggttccatatctttgcaattctgaattgtgctatgatcaggtgtctttttagtataatgatttactctcctttgggtagatacccagtagtgggattgctggatcgaatggtttttataattttctattttaccacagtttctctctgcatttttcctctttgaccactaaccatgtgaaattctcatattgacctttataatgatcatgaactcttagtatcattgggaaggccacatttgccacttatgattgtaaaccttatcctccatttttcctgttattgttggtgcaaaaagcacctattataccaggactttaaaaatcagtctgataagtctttgataagtctaataataataactgataagtccattgaatttgcttctgattactttttctttagtagctaaacatgtatgtactcctatgattacaatgaacactcctctccatttaaattaattatttacattgatgaaatagcaaaatgttaatgactaaatactgtcttggttttttcgttccaggtcagtcaatattaacttcttataattttcttttttttctttatgtgtgtgtgtgtgtgtatttttttttttttaatttcaatggcttttggggtacaaatggcttttggtcatatagatgaattctacagtagtgaagtctgagattttactgcaccggtcacctgagtagtgtacattgtacccaatatgtggttttttataccttgcccccctcttaccctccccactttgagtctctagtgtccattatgtcactctgtatacctttttgtacccataagttagctctcacttataagtgagaacacacagtatttggttttccattcctgagttgcttcacttagaataatatcctccagctccatccaaaattgctgcaaaaaaaaaaaaaaccacaaacattattttgttcttttttattgctaagtcatattccatggtgtagagataccacattttatttatccactcactggttgatgggttggttccacatctttgcaattgtgacttgtactgccatcaagtgtctttctggtataatgacttcttttcctttgggtagatacccaggagtgggattgctagatcaaatggttcttaacattttctctctggatctatttctggaaattttaggctccagtttttgttgttgttgttaataaaatgcaatggaatgtaatgatcatcacttttcattatgctttaaaatctggtaaatggaggctagaacactcctgtaaggcaagaatattctctctgttggaactcaaatacacagaactgggtaaatctcaatcttaatctttgattcaggacacaacatggctctcttttacttgctttctttaattgttttttaataatgtggtaagcatttctgaatctcctatccaatacaaaaactaggacaatacagacagtaactcctatggttacaatgaacactcctctccacttaaattaattatttacactgatgaaattgaaatagcaaaattttaatgactaaatactgtctttgattttttgttccaggtctgtcaatattaacttcttataattttctttttttttctttatgtgtgtgtgtgtgtgtgtatatatatatatttaatttcaatggcttttggggtacaaatggcttttggtcatatatatgagttctacagtagtgaagtctgagattttactacaccttccacttatgtggtcccacaccacccgcctcccctgccgcctcctgccaccccctaggccaaggtaataatcatcctgaatcctgggtttatctctcacttgctttcttttcatataattttgcaaaagaatctgatctaaatgtgtttttcagagtatatatttatattttagctgttcttagagaaaatttattattttgcatgtaatcttatggaacattctcatttaataccatggtaagattcagcccttgcccaggggatagttcatttagtttgtttactggatagagctcatcatgtgactatacctcagttagtttatcagttctcccatccatggtgactaggttgcctctcagcctctcaacaacactgtttctcagtgtccttgtagaagtgatatgtgggtgttttctccttacacagagttgaaaggtgacgacaacaacgttggcactaccaatcccccaccctccagaggggtaaccagtgttaccagtttgctgtgtttcctgctacacctcgccttattcacttccatttgtatctgaaaaacgtgttgcatggtttcttttctatagaagtggtaaaatgctattgtgtcctgtacattattgattactttttttcatttaacagtagggagatgcctgggagtacacagagaactgccctcattgttttcaacttctgcactgtatgtctgtgagtttagccattctgctgttaatggaaatttacagtattctaatcttttgatattacaaacagttctgtgcgatcatcgtcatacacaaccccttgtgcacaatgcatgagtgtttctcagggtaggtaccaagaagtgaaattcctgggtcatagggcgtgagtccgacatttttctccattctgccctgttgccctccagagtgggtgtccagctttgcatacctaagtatgagagtatctgttgttcatatcctctacgacgctccatatatgaaacttaagtttctgctagttgccatctttgatctatcatgtatgcagtgacctactaagactgtaattggtacagtagattcttgtcatctgtgtgtgaatttagcattcatgggcttaatgctgacaaggcccccagggtccaagacatataatcatgtataattttgtcaaggtataattttttaaattgcttttgtcatgtgtctgctggtgatgcccaacccagtgctctgcacccaggtcacactgtggctttgtcctctgcttatgcctgcattgcagcaactgtcctgaagagaccaaaattatgcagatttaggtaagtccatggctaatgttattatattatgtgctattgtaatggatggggctgtggagtgtatgaatttataaatcactggtcttgtaattaaaattcaaacactatagaaaaaggccatgtagaagataaaagttcctctataatcccggacccctaagataactactaatgacaacttcatttatattccttcagacattttctggctgtggatgtactaaaatgtatcctattattctctgccctaaaatggaatcatacaaggtgtactgttatttttatggctctataacatgtcatattgtacgtgttggtatggtcattttaaccatttttctagtgatggctttgaggttatttgcagtttcctagccatctcaaagtgtgctgcggggatctcttttgcatccctctgggtgcagagctgaggcacccagaggcagtgtccagaggaggcagcatctgtaggtgtcttcacctgctctggctcttggcacatctggttggtgacactgttttgtgagatgggttgaaagcacgtgctgccaaaatagaataatgttggtcctctcctcatgtgccgtggaactggggtaaaactgcgtagtggctgcagctgcctgtccataccggaatcgagtataacacggtgcctggcttagcacaaaacagtagtgggtcctgcaggccccagagtctaattcctggtattctttcccctacacagattaaataaaccaaaaacaaactattctaggaaagcgtctgtgacatttgtaaaaagtggtatttaatgatcttttattcacttgtctgtttagtttgttgaaatcttaagtggcatcctggtctgggaaggagtgctgtctgcgcctgccctccgctgggcacagcgtggctgcttcaggggctaagcacacactttctgtcttctaaagggccgccacatgccaggagctcaggtgtgagcccggctctggctcttacctcatagggtcactcataggggcacagggagcagaacattgtacacagcgaggcaccacccggcttggcatctgcctcggtggacttactacctctagaaggaaatacctgagttcctctggcctcagctcctagagtgactggtgtgctgtccctgttactcttctgtcaaggtgacaactgtgtgacccatcatctgtgtgtcaaagcaaggccctgcctgggcctctgctcctgtgctgaccccaaaggcaaatgctttgctagtttccttccagttaatttcacctatgaatagatgtgtgaaaactgttcaaagccatacctgcacatgtttgaacttcaaaccctgtgggtgattcagtggcatctttctctaacccccagcctcccttcccacagaggccaccgtcatggccagttgctgcagtttctttccagagaacctgtgtatgtgtaaagctgtacaggcgtgggtacaccacacagcctgtcttgcactgtggactgttgagttactagtacatctaggtaagcaccgcatatctgtattcatgtctgccttggtcttttcaacatctgtgtggtagccgtgtttgaattacccattccctttttggggaaccattaagttgtttcagcaatttttactgtagataaggctataccgcatatctgtgtacatgggtttttatgtacatgggcaagtatatctgtgagagaaaagtttcctcaggaggaattctgggcacagcatgtgtaaatttctaaatatgatggacacccccagcttccacctcaaggaggttggtcccattgacatttccccacaccttcacccaggctgtgcccttaaacttggttatttgtcaatgtgagaagtggaaaatagtatttaattgtagtttggatttgtatttctattgggttgtatacttactgattaataataagagctctttacatattaaggaaattaacccttttcaaatacattcctatttctcactaatctttaagttttattgtaatattttgctctttagtttatatatatatgtatatatatatatatgtatatatatatatatacatatatatatacatatatatatactaattttcttttatggttcctggattttgtgagtagtttgaaaaggctaatccagctgaagattttgttgttgttgttaaaccccatgttttctcctaactctttttatttttattttggaggactctatctagacttaattttagcataacaagtgacagggttagttagcctgttgtccttacaccattttctggctaatacagctattaactattgatctgtctattcacgtgccagttcctaatggttttacatagtgtaatctgcacttcaaaatagcgaagggaagccctacctcattattctacttttccagaattctcctggctattccaggctgcatgtttaccttaaccttccctgtgatgtcttcatgccgttgtcttcttatgcaagaataaggtacgtctttccatccactcacgtctatttaatttgactttgcattacacagaaagctggtcttggtctgtctacctcggcatctagttgtcctcactgccccctagccgaccccaccccatctgactgactaccccatcacagagtacttttatttacgttttgctctgcctaatggttacttgatactgtcacgccgacagtgtccagttcagtggtctttgcagttgaaatgctcccgtacacactgtcttgttaaaaatgccagtaagttcatacaaacccagcttgcacccaaggtcacattcagagagcgtagggctgggatgggttgttttccaagcttctgccactgtgtggctagctcttcccactgggaagttctgtgtacccggaatgtcggagtggagtcctgttctagtgtccagcacctgaccctgtgcccaacccctcaacagcctattcctgctgtccacagcctgctggaactttttacaaaatatgttgccatgctggaccctgggcactggacataagccccctggcagcctttttcatgtcacccaaaggggtaattgtcctactggtggtctgtaagatgagttagggtgacttgctaatagacattgtaaatcttaatatttatgtatgtattttattattaccggttttccatttatgatggtaatattgtttcttctaagaatatttatttttccttctaaatattgagataaaattcatgcttttgaaatgttctattcagtggcttttagtatatttgctatgttgtgcaaccatcgacactatccatttctagaactttttcgtcatcccaaacagacgctctgtattcataaaaaaataacttcctacctgtctctccccctagtctttggtaacctttgttatactggtaaactttgttgtgctctctgtctgtgtgaatttgcctattctaggggcctcatataagtgtaatcatacagtatttgtctttttgggtctgtctgatttcacttagcgggttttcagggttcattcatgttgcagcatataacagtactgcgttcctttttctggctgaataatattccactgtatggatagaccccattttgtttattcacacatcatttggacatttggattatttctggtttttggctattatgaacaatggtgctatgaacagttgcgtacaagtttttgtgtgaacatatgttttcaattctctcattatatacctaggagtagaattactgggtcatatggtaactgtatatttttgaggaactgccaaactattttcccacgtccatgcaccatttcacattcccaccagtaagtaagagggttccaatttctgcgcattcttgccaacactagttattatctgactttctggttataatcattctaatgagtgtgaagtagcctctggtgtcatttggatttgcatttctctgatgagtgatgctatcaagcacctttgctggtgctgttggccatatgtgtatgttccctggagaagtgtctgtgctgagccttggcccactttttaattaggcgtttgtctttttattactgagttgtaagagttctttatatattctggattctagacccttatcagatacatggtttgcaaatattttctcccattctgtgggttgtgttttcactttatcgataatgtccttagacatataataaatttgtattttaaaagtgacttgatttggctgtgcaaggtggctcacgcttgtaatcccagcactttgggagactgaggtgggtggatcatatgaggaggctaggagttcgaggtcagcctggccagcatagcgaaaacttgtctctactaaaaatacaaaaattagtcaggcatggtggtgcacgtctgtaataccagcttctcaggaggctgaggcacgaggatcacttgaacccaggaggaggaggttgcagtgagctgagatcatgccagggcaacagaatgagactttgtttaaaaaaaaaaaaaagtgacttgatttaagggaaaaaatgactggctatattcagtcagatatggcaaaaagtctcaaggtgttaatgtgaatgattaaggtcttggggggggtgtcccctatcagactacaggtgtttagaggcacagaaaaaggtgcagttgggttcttaatgtgaaatgatgagaagcacaactccagtgtgtctctttgtgtagaatgtcagcagacaccccctgctagatgtgctggatcatgggaaagcatttccatttgttactagattgttcagaagttttaatttatgatgggtgtggtggctcatgcctgtagtcccagcactgtgggaggctgaggcaggaggatcatctgaggccaagagttcaagatcagcctgggcaacatagtgataccctatctcttaaaaaagaagaagtttttaaatttgaaataataataggtactggatttatgcaaatgtcttttctgcgtcttttgagatgagtatcaggtttttttttttccttttatcatctgatgatgaacttaatgtttccatttgtattaatggaatactaagtccctctgtgatttctgaaccaagctattcctaggcctgagttttattttgttgacacagaaataaattagaaggccaagcgtggtggcatgtgcctgtagtcctagttgctgaggtaagaggattgcttgagcccaggagttcaaggctgcagcaagctttgattgcgccactgcactccagccttggcgacagactaagacgctgtctcaaaaaaaaacaaaaacgacaaaaaaaaaacaaaacagaaaaaataaactaaggcaatgacagtccctggcaaatgctgggagggaggcagcagtggtcagggaaggtaaccctgaagcaggacttgtaaagcaaataagattgggaggccaaggtgggtggatcacgaggtcaggagttcgagaccagcctggccaacatagtgaaaccccgtctttactaaaaatacaaaaaaattagccaggtgtggtggtgggtgcctgtagtcccagctacttgggaggctgaggcaggagaatctcgaacccaggaggcggaggttacagtcagctgagaccgcaccattgcactccagcctgggtgacagagcaagattccgtctcaaaaaaaaaaaaaaaaaaaaaaccaagaagaaaaggaatgaattagaacttcttctgcttggacttaagggcatcatcaggcaggttttgggtaggatagcaggggaggcagagacatagtcggggtcagtggtcatgagtgtggctttgagcccaaaaacttggtttctgttccctactttgccactcagtagtgcatgactttggccaaatttcttaaattcatgaagcaagtttccgggtgaatgaaatggggataaaaatagtgttcaaacctatccgttggtttgtgtgaaactgaaatgaatagtatcgtgcaggtacttgtgagcaaggggagctgctgtttcctgtccctttatgatgggaaatatctagacaagttcccaaccctctgcactgcaggctgcatggcacggagggtcttgtaacaccagctggggctggccttcttttaggagcttcagtggttctgaaaacttttatttgtttgtttgttttagtagatgtggggtctttctgtgttgcccggactggtctcaaacttctggactcaagtgatcctcccccgctcaacctcccaaagtgttgggattacaggtgtgagccactgtgcccagccttgaaaactttttcaggttcttccagggttactgggctattaaatatttctatttcattataagtcagtttttcaaagttatattatcttaattaccttttttatatgtattagtgtagagtagcattttatattttgatatcctccttatgcatagtttttcactttttattcctagtttttcgtttttaataagactttcaagaaatttattttattggccttttgaaaaaagcagctttagataaagtaagcagttctgctttcattttataatttatttctacttttgtttcattaatcttttcctccggcatgccttggattttgttgtgttactctttttctagaggctcgcattgtgtgtctggttcacttatgatcacgcttgcctacttttaagaatggaagaggggaggtggagggtggctgcacagtcgagggtgtgaggcagtcttgctctagccccaccatgccctcagcccgctgtggccacgctggttcctcaattgctggggcgtgcagtgtctgtaagggaggctactgatgccatccgaggaagatgtaaggtttcgtgtgggcagcgagagcctagcaggcatgtggggtgcccagcaaagggtaacagtggacagttgttgcctcattccacagagttttgattttttttttttttttaatggtcactccatcaacatcccccatggccagagcctgagctggtccccagagacacaggcattcagctgacagcctcgccttcacgctgctgctgttctcatgggggacaggcctcaggtggcaatgcacaaatcattagttaagggcagttgtgacagttaccaaggagtgtagtcccccgccccccgcccagtgaaaacagccctaaccaggggtggggacctttgggctctgacccgaagggtaggagaagctggaaggacagcattcctgtctgcgaaggcaggagcaaagctgccaggctatgaaggaaatggctggagcctgaagtcatgcaagctggggctggcagggacagggccaacttccaggcctgggggccaccatgaggattcaggacgtgacccccagggcacatgaaggccttccatctgtatttaagaaaagactttatcagacgagtatggtggctcacgcctgaatcttagcactttgggaggctgaggcaggtggatcacgaggtcaggagttcaataccagcctggccaatatggtaaaaccccatctctactaaaactacaaaaattagccaggcatggtggcgcacgcctgtagtcccagctactcgggaggctgaggcagaagaatcacttgaacccgggaggtggaggttacagtgagccaagatcgcgccactacactccagcctgggtgacagagtgagactccgtctcaaaaaaaccaaaagactttatcttatttcctatatgtttgtggtttcagtcctgatgtataatttgaccctagttagaatggttatctgaggaagtggcctgtacgatttctgcttttttaaatgtgtggctccctttcttcattgattaacgtatgattatttttataaatgttccatggcagtgggaagggattctctgtcacattccacatctggatcagttcctccccattttgttggtcaaatccgatctgccatatcctgtgtaatgacaagtgagttgcattctcaccgtcactcctggggtctctccgcttcccctgagctggctcagcagtctgctccatgtgttttgatgcagggtgacccattggtattcccgacactaacgcccccgtctgtggactgcttgctgcttgggcttcactgtgtctggtgttgacagtgcagacctaaaggtgtgcacacatgtgcacacacactccgctgtcttcttgtttgcactggacttaaatatctatgagggttattttcaactgctgaatttggaatgatttttatatcttttctgctttctgcccatgtacatgtgtttattttacactgttgtgattggtagttactatgtggggacacaattacttgggctgaaataatccacctgttgtggttggggtcctctggggcattccagggtgagaggttgtcactgccacctgggccatgtgggccggcaccagcattttgtggttacgaattctacagtcacaaatatctttgggcaaatccccttctatacctcaaggcagcttttggtttgcaaccccactggccagagggaagggccagtcacttggctctctcactgccctgcgccccagatggttctagggctgctgttttcccttggccctgccaacaccactgtttttacttctgctcattggctgagtgcagtggttcctggaagccagtggcacgtttccccgcgtagctcgcttatcccacagcacacacccaagggttctgttgctaacacgctgaattaattctttgctcatcttacagagtgtgttttgactgcccccatttctgaggccttgtaaggccagagctttgttgcttcatcggcaggttgggacttagatggccgtgaatgtttcctctctgctgctgcagtaagtaagtgcccgcaccatagtgtgtttggaggctgaagttgaagcgaggctgtgaggggagatggacgtgtgaggagggatgatggggcttgagcaaagtgggggagggggcaaaggcagttggcccaacacattccccacccctttgagaggtctgaggcctgcagacctggctcggagcccacctggtagtcctcagactgtgtgtgtgtgtgtgtgtgtgtgtgtgtgtgtgtgtgtgtgtgtgtgtgtgtgtgtgtaaaagagagaagttgtggagaaatggggggctgattctgctcagattcatcaggatgagtagaaggcacccagctctcaccctggcctgacatgtgtgtccctgagcaggttacagtcctctctgagcctctgcttcccatctggaccctgctgggcagggcttctgagctccttagcactagcaggaggggctccaggggccctccctccatggcagccaggacaggactctcaaatgaggacagcagagctcgtggggggctcccacggacccgccgtgggcccaggggaggcagagcctgagccaacagcagtggtgctgtggaccgtggatcctgagggtggcctggggcaagtaccggctgagggtccaggtgggctttgtgtacctttgggtcctggggccctggtgacttggactccaggttagagtcaagtgacaggagaaaggctggtggggccctgtgcttccgacttcatttcgagtgatggcagttcccaggaaggaatccacagctgacggtggctgacagatcagagaatggaaggcgaggcaggcgggcgtctgcgtgacctcaggtgcttggggcccagcagacccagagaaccatttccactaggccagggtgccggaagtgtccacaggtcttagattccctgttcagatgaaaagatttgtgcctttaatgataaaagtgatctgcatagagtcaaaaattcaagccatgggtataaaatgcaagtaaaatccctgccctcacctatcccaccctactacacagagatgtcctctcgagtttcctagactcactctggaaatttctgtatacacacagaagcttgtgcctctgctcgtgaaggcagagggagggagagctgaagggccagcaccttctcacctgtgggccccctcagtgctcggtcccagagcatgcaggactgtgcctcgtgttcagtttgctggtctgacttcatgctccttgggcaggatatgcatgtgccatgctaggagacatgtggatgtgaagctgggggacaatgtcccctggctatgcctttacaagggaagtaaggaaggtaggaggtgagcctgggagggagggagggaggcgcggagccgccgcaggtgtttcttttactgagtgcagcccatggccgcactcaggttttgcttttcaccttcccatctgtgaaagagtgagcaggaaaaagcaaaaggcgctggtggtggcacgtccagcacggctgggccggggttcgagtccccgcagtgttgctgcttccttccagctccctcctccaggcctctcctcccaccccaccagggatatcttgtctcctagaggggtagcattgggtggggcaccccaggcctctcccagaagccctcctgccctgctatcccctccctcatcctctggggccctgggaatacagcaggggacgtggggccacaggcagctgataacttagccccctcagccactcctgtgggagcgggagggggacagcttggcggctctgcacccaaagctgtggggcctacctggagtgtccccacccctcagggcatactccccactgccctcttcttcccaggatcaactcaccgctaccctcctctccacatctgaggaccagcgtggctcttccagggagggcttggggagatgaggtccaaggggagaggccagaaatcctgaggcctgggctggagatgggtgggcggacagg

SEQ ID NO: 396 - DNA, 136551 bp, Homo sapiens
  source 1..136551: mol_type = genomic DNA
cgagtctccgcccgccccgtcctggaggtggggagaaggagggcggggcgggggggacggaaactctccccgccaaatcctggccccaggcctggggacactcgcggcgggaagatttggaggggaggggagggggaggggcgtgggggcgcggcctcgctggagtccccctgaccccccgacccccgcccaccggcctgggcgtcctcccgcggcccctcctcccctcccggcgcccggtgctctggggcgcgtgccacgcctggctcggcgccgtaggggcccccgcaggtagagacccctggaaatggcctcgacgccgcaggagcgaggcggccaccaccccgctaatccgggcacgtctctccaggccgaggcctgcggtggaaaagccggggttccatttgtgctgagtcggggcggccgaatggagccaggcctcgggacgcgggacggacgggctctggccgcgcaccttcgcgggctctgcagcgcccgaccgcctcccccggcagggaggaggcgcttgtggggggcacccacggggcacagtgatccctgggggtctgcggacctcctgggccccgcagcagacacgagtttagcctttgggtttagtttaaatcacataagggtgtcgtgcaatcgatttatggtttctacacaccagacactttaacctccaaccccccccatccaaagccaacaagaaaatgcggtgccgtgttggcagctgagctgcgcccgaagagacgcagggagacgtaagagaggaaagtgtgagtggccggggggcctccccccgtcagaagtcgcgcagtcgcgcccataaaacgccccctccgggcggctagggcaggtgagcgcgtccccgggcctccccacgccggcccctgccacaggccgtctaggtcgagcagatatttacagaataaaaatgacaataactcgacgtcccgggacggccacgcaatctgttagtaatttagcgggatgggaatttcctttctagggcctgccagtgaagcgcttttccaaatttccacagcgggggaagcctgcgattttacataatgacttcagcatgccgggctttctcgacacccctccccggcccccggcccccgccccccgccccttttccagcagggccgggctccctccggacacccgcgtggactcaggcgtcccgtctggcccgttcgcccccgtttcccccgccagccccagcgcccccctgcccggcccccggattccccgttcccgcccctacgcccccatcccctccccgtgcgcccctccccgtgcgcccccctccccgtgcgccccccctccccgtgcgcccccctccccgtgcgccccccctccccgggcgcccccctccccgggcgccccccctccccgtgcgcccccccctccccgtgcgccccccctccccgtgcgcgccccgcctcttgcgcccctgcccccaggcgagcggctgccgcggcgcggggaggggcgggcgctcggcgactcgtccccggggccccgcgcgggcccgggcagcaggggcgtgatgtcacggcagggagggggcgcgggagccgccgggccggcggggaggcgggggaggtgttttccagctttaaaaaggcaggaggcagagcgcggccctgcgtcagagcgagactcagaggctccgaactcgccggcggagtcgccgcgccagatcccagcagcagggcgcgggcaccggggcgcgggcagggctcggagccaccgcgcaggtcctagggccgcggccgggccccgccacgcgcgcacacgcccctcgatgactttcctccggggcgcgcggcgctgagcccggggcgagggctgtcttcccggagacccgaccccggcagcgcggggcggccgcttctcctgtgcctccgcccgccgctccactccccgccgccgccgcgcggatgccaagcaccagctttccagtcccttccaagtttccacttggccctgcggctgcggtcttcgggagaggagaaactttggggcccgcgccgcgcgccggcggcaccatgaagtcagcggaggaaggtaagccccgcgcggcctccgcccccggacccctgcgccccccacggcccgggccgcgccccccgaccccgcccccgtcgcccgcacggaggggtccgggccagagaacgaggtcggccgggtctgtgcgcccagggaggggcgcggcgcggaccgggaacggcgtcccccagctcccagcagcccggttccgagcgcgccttctgccaataggtgtctcctctgccccagcgctgagggcgcgaggcgaggccgccgcgggtcccgccgaggaagcggctcgcaggccggcgatttggggacgggcgaggctgggccgtcaggaccacagagggcacgtgggagggaggaagggaggcttccttgggagtgaaggatgccccgtgtcttcctgagcgaggcagagccaccctctggcgccaagatcgcggtttgggggttctgcgccccccacccccaccccgagctcgtggcggcgtctccctcgcgccgcgcccctgaattccccagggccgagcccgtcacgccggctcctggacctgcaggaccaaaagatccaaagcgcggccgcagcacagccccgaatttaagccattttgaaatcctataggcaggagttccagccagagaagatgtttcaggcaagtttgaaaaggaaccgccaagtttcgagctgcttctttatagtgaaaaaaagatggcacagtgtgggtccctgaaacccggtgtggggggcgctgagacccccctgcggcgcatctcacattccagtcccccaccttagcccgtccccggcacacacccctggcgatgccgggtgggctcctgcaagtggctttgaaaatacccttgcagaggtgtgagcatacgagttagggattagggattgcaatgctaatggaaattggaagacgcttttccaaattccttaccagctctgaaatattttatataatttatttaaagagcgccagcacacctgccaacatatgtacttcataagggcagacgtccttccgagcgctgccgcttcctgcgcgaccctgataactgcggggcttgcttgagaaccgggctcccccagctctggaaaactcgctggtcttagcagagctgagcacagggccgtgagctccacggaggggggtccgtgtggtcggtgccctgacgcttcacgggacgggaggtagacaccacttcatcccaatgttagaaaatgttgacatgtttaaaccatgtcccgtgtcagtgttttacacaatgtgctcttgctagtagcagagtttaaaaaatttttttttgttggagtttcggttttaaatcctgggacacttacgccgcagtgttcattatcactccctttagaaaggcaggtctttccaagttcagatctctgtacctgaagagccggtggccgacctgtagtaaggagcccctttcttttacgcaaggaaaaaacacgacggggcagtggctagttttcgtgtttcctactgaagaaaataagctcgaaaaggtccctgctgcaaggcagtgcgccgggcagcgacgcccgaccgacatgggtgtattttatgagggctgcagaactgggccagccggaaagtgtgatctagtccttgatacacacaggccggcagcatggggacacgcgtggtttccacaccagccatcgctgagaccaccgggaagaactctgagtccttctgagtaggccccacgaggccattcctggcccatctgaggacctgggcgcctcccctgcgtccctcgggtttcgggaccatctgggtggaagctcattaggcgtcgtggttcctgaaggccccgggcttgcttcctcatggagaacgcagagaagtacaggcctgtaagtagccacccagtcagaagtcgctccagacacaatgccccacgggctggggccaaacaaagctcaccctgttctctgccacttaacttcacagcgttgtttcccagctcagattagaaaatggcagggcgctggcaccccgcttcatcacacccagcggggcttctgtctccgcagacatccccagcctctgggaggatgcgtccaagctaaacatttccatggagacacccagtgtctgtggaacgggcagctttgaatctggaccaatagctctgaaccatttgcaggaaggaagcccagcactggggcgggggaagggggggctcctaggagcagcaggggagccgccccaccgaccccttctctgggatggagaccagtgcagtcctaggacagcagcagtgagcctccatccctgcagggcccgcggcctggggccaccagcaggcgggacagtttagcaaaaagttttagtctaaacagatgataagggctgtcatttgtgtataattttatggtgggggtaaaaaggtggctggagttttaaaaacaatgtacaggccgggcgccgcggctcacgcctgtaatcccagcactttgggaggccgaggcaagcggatcacgaggtcaagagatcgagaccatcctggtcaacatggtgaaaccccgtctctactaaaactacaaaaattagctgagagtggtggcgggtgcctgtagtcccagctactctggaggctgaggcaggagaatcgcttgaactcggaaggcggaggttgcagtgagcagagattgcaccactgcactccagcctgggtgacagagcgagactccgtctcaaacaaacaaaaacctgtacaatggaaagagaatgaaacgttgtggcttctcaacagaaaacagaacttccacttgcccaaggtcggcaaaagcagcaaaactacaacaaaacaacgctccaacatccatcccaaagtcagaagtattattagaaactaaatcaggccacacggaacgatggcttatcactggagaaaaccagccagtgaaagggtcgcgggagaagcccggggacgaccctgggactggagggtttctcgcctctggaaaaggcagtgcccgcggggcaggccagagggagcgctccgaggagctttggggttgccagccttgacacgcgcacccctccgcccgggccggctcccctccgccctcagactcccaccatcctcctactattccacatgtcgggtgtatatggtgcggagagcccgggggaagttagaacacgcggcgggagaggcaggcccagggcggcctcagctaagcagcccggctttccggatccccgccgcgcacaggctcgggccgcctagggtgggacccgaactcgccttcccgccccgctcaaggaggtcatctttggaggtgcccctagaaggaccggcgggtttcccgcggggcgggggcgcgcagggcgggtgtttggaggctggggactcgcaggagaggccggtgggtgccgggcctcctgcagggggttgcaggccgaggggcgcgccacgaacccagcgggaatccctgcgcttcccggcaccgtcgggctgaaatcggggttcctagcgttggcggcctcgggctgggacctccccactcccggggctccgcagggcgcgcacgtggcgctcgggggtcaccgttgcagccgctttcccgaggaggcccggattgaaaacttctttaaaaaaaaaacttaaaaaaaaaattccgtcgccctgggcgcagccttaggtacctggtgccgctcgtggggtcccgacgcccctacccccgggtccggaggagcctgcgccgggccgggacccccagggcacaagaggccgggggacccctgcggtcgcgcgcgcgcgagggggcgggggcgggggggacacgagtttatttaaaaactcgtgtccggggagtttatttaaaactcggaagccggcggccgcgagccggttgtttatgtaaacccggaaacgccccggggggcgggggcggggcggggacggggggaggggcgggggtcacgttacgcggaggacgcgcgggcagcgccgggagaaccgaacccctggcggccgcgaccccggctcccgccccggccccggcccgacccgccatgacggggctggaggaccaggagttcgacttcgagttcctcttcgagtttaaccagcgcgacgagggcgccgccgcggccgccccaggtgggtcagtcccggagggcgcggggggcgcggggccaggtcggggtttgggggcgcccaggccccctccgcgtcctcgtcgctccccggggaccccaggagtccccggcgcgcccgggaccgaggggctacggcgggggacgctgcagtgcggggcgtcctgggctcggatgcggttcctccgagcgctcgcggcggggtcctgggggaagagcgcagcccggacacgggcgtggacgaagtggtcccggacagagggctggtggcgctgccagaggcggagaagccccagctcccccagacaccctctccccgccccgcgtcccgccctcccgacctccccgaccccccgaccccccccccacccgccccccgacctccgcctcagccatcctcctccctccccccagccaccctccccctgacctcccgcccctgccgccgccttctggcccttcctccccacagtcaccctccctccccgccgccgtctccccacgccccgcagacccccccaagcctccagctttcaagtttacccggagctaccatgaccccagccttttctttcattttctcttctctgtgtcagaaataagggtttcaggtaaacaaaccacaaataactccccactcccgaagagcagcgagtgagtggggtgggcacccctgggcctgggcccctctcccgctgcccgggatctcttctgtccaggtcaccccaggctggtcaccgtccgcccctgtctgtgcccattctcaaggcctcgtgtctgccctccccgcgcggaggtgaagccggaggagcttggcaagcagggacctccgccgagtctgtaatgagggtcatattttccgtatcgttcactactctcttttaaaaactccaacgtcttgatcattttttgaaaataagcgctccaaccaaacctgtgctgcctgcggttctcgactcaccactccccaaatgtcttccctgcctgggcctgggttctaggtctttggggtcagtgggagccaaggcagatgagggtgggagagagacccgccggaggcccttcccacccgggctgcctgtggccctggcgccgccttccagagctggttccagtcctccccggcttgagccaggacatttcagcagaagagttttctacctgggtgtgccatgcgagagtgtcgccccactcccgacctctctttatggggtgaaagtcggtcccatgagagtgtggccaccagggtggcccctctgggatctgttggggtggaggctcccacacccgtgcagtcatcgggggtcgggtgggacctcccagtacacccccggtcgttcacagcgtgaatcactgactgtgggcctgcgacaggcccagtgctgccagaacccaggccctacaccccagtcagaggcccagggggcctgcaggacagtgtacggccctgggccctcggccctggctgaagatttcactgctttgcctccttgaagaagcacagggggtagttatccccatggagctgggtctccccggcctcccaggcctccagggtgggctgtgccacactgggcactgtgtctggcttggcacgtggtcagcgcacccccagtgacaagggccacttccgtgcctccgtgcacacgtgactgtgcgcgacagcagcctcgggaaggacaccgccggcggcggcatcctcctgtgactgcacaggtaactccaggcttatccgggaagacgcacaggaggccagtctctgcccctcgaggcctagtctcacaaggacgccacagtttatacaccattttgaggtgggcgggcttcctgctggcatcggatatggggaccctggtgaacatggggtctctcctgacccagaagcaggtggccgccttccaggtgggttcaggacacagtcctccccggcacccaccgggctcattcccccaaaacactccttgagcagaatgagtgaagccgtgaacctcaccctcgcaggcaccctgggccctccggagctgcgcccttccccgggagccccgcagagctgggctgctggctctccaggcggcttgtgaaagctttctgctgtgtccttgcccctccagagaccaccgtggttttgggctttaggagttggggctccgagcaggagaggcgagagctgagaagagccccttcctgcttttacggtgtcaagaagttgctaggaagggttctttatgtatctcatatgttacgtgtacatattgtgttttcccgtgagacaccgtgctgttttctcctttctttttattaccattattactgcattttgatgatgattcaatggtgttaattatttatatcacattgttaaatgattacattgactctccagcttttgacgggtgatagaaactacttcacgttgtttctgggatgaacctggatataaatgaatacatgaataagtctgagatcaattgcaaagcaaggcaaactgggttttatagattagactaagcacagaaagtcaagctttgttgtaaaggacgtggccggccctgagcccaggaggcagtctgtcagccggatcccctgagaaggggctgtacgtcctggcagagctgaggtcagtgtaccggggttgggggctgcagccgcagggtggctgactgtggccaggagcctggcccacgccgctgtggcccccaccccttccatctcgctggacttaggtccaggctgcgggcacaggtcccgcgtcttcacggggtgctttgagggaggggctgtgtcttgttctttatttcgaaagtgctcagcaggtgcaaagaatagatattcagtaaccatttgttgggacaatgaaaagagaatattgtaaataatttcccaggcgggatgggagtggcgtttgggcttccagggtctggcttctggctgtgtccacccaggagcaggccccgggcttccctctgcagagaggaggtcccgctcccttctggggctcaggaaatagctgcttcgctgtcagctgggaggcgggcgtgccctgcttcccgccccagggctcctgttttctaagttattttggccagcttggctgctgccagcactgtcgccgtggcaactcagaggaaattggccaaggcctctgtgtttgggctggagcctctctggcagtcggggccaccctccgaacctctgtgtgcccgggtctgccactggcctgtgcccactgctggggcatttaatggttcccttgtggaaaggcaacatcttatgcagaattgaagctttggaagacttttattctcaagtccattttcaccaaataggatttctcttccccaagagggcccggggtgtccgtggctggtcgggggctgtggcaggaaacccgtggcagagacgcctggtgagcagagaggtcccaggggagagctgaattaggaatgctctgttgttcaagttcagtgttttaggaaagcgttcctgctattaccatgcacagctcatcccctgacgttctagaggtgtttccgtggagggtggagttacctggcagattggaatatttcagttctgtgtcgtgtttttcaaaggaagatctcagctagccatgaacaacttggatattttttaattccttgaaaacagaattcaaaaaggatgctttaaaatgatgtgtgcgtcggaccagggggaatattccagtacctctgaggaacgatgtcccaggttgggccccgggctggacgaaggacccttattaaggcgttggcgtgcttatttatggaacattaaataccgtttgtttgcgctgtgacgaggccatcctatttgcctttgtaaatctttctcgctggcagattgttgggggaacggcgtctgggaagctgttgctgtctgtcatgccgcgggcctgaccacgtcccggtgccactgtgaggcagcgtttcccaggcctgctaagcacattgcttccaacagcaaggtcttggcgtggatcgccctgcttcgttttgttttatttccaatacattcacagttgtcatctggcctcacccacagcagactccgtggctgtctggagaggtgacagcagtgcctgggggtcgacctgtggttcagccccagcaagtgctgaagggaatgttccttaaaatgaaaaataacgtcgtctgtgatggccgcctctcagagtttgtgaaagatgagagatctggctgtggctggagttggtgattcttgtcagcagtgctggcctgatgcgcaaggcagaggcgtggctgtcctgccctgcgcacagcgagtgagggagtggctgtctgggaactgcgtgtcgtgaggggcaggtgccctggggctcagcacggcggggtctgcaaggttagaatgctgtgcacctgtagggagccctgaccagaagtatttcatgtattaatttaatgtcaggcaccgatacagttttttgtggttgttcagaaacgagaaaggtgtgtggttctgaagtgaattatttctcagagtgagagagatcgcttttaacagctctgacatgtggaacttgctgaggccagtgggactaggctggcctgagagccgggtgctccccgcgtggccgtctgtcctagcacccccaaaccacctgtgtgtcgtggggcacctgatggctgagcgagccggtgaggatcaggggactcaaaagtgaggaggtggcactttcagcagaggggccatgccatgaccttccgttaagggattttgaatgtgctctccgcgatcattgcttagaatccagctgtctccctgctcacctgcactgtcatttagtgaatcctccttggcaaagagccaggccctccgacacggcagccagggagtggggtcaccgagctctgtggtggtgtctgacgtgacatgaatcagcccaagcgcctcagaatcgtcaagaaagttactgggaatattttcccttcatgtaaatatgatccctttgaatagttaaataactcagatttgaatacggtttaggtgggtcatgaaaccaaattcattgggagctgggagggaggggctcacagccaggacagtggcccccggcgtgtggggcttggcctctgggggcagcttgaccccacaccttgcccttcttctaggaggaacaagggaactttatccactacccgccctccaaggacctgggcgagggatcctaatgaaattcaagcatttgagctttcgttttgtcatttgtttgatcagggaaaacgcatgcttaggtgagccctttttgttttttaataaagctttatggtgtttctttgcctcatcgaatcaggttttattgcaatacttcagtttaaataaaggccctcgggtgccccaggcgtccgtgggcctctgcatgcacttcctgctctcgctgtgggcggagtctcctcctcttcctcacttcccctcacgcctgggcccccgtcacagaaacgtcaagggctacggcccctgaggacttgcacacagagacctgtgaggtccgcctcccctttcctgccccgtttcatctagaaccttccggtgatctggctctagtaccccgtgtggcgcagctctgggctccgtcactggctgagcagccagttcagggctgagtcctgtgggaggatggtggggaggccccaagacttgctctgttaattgctagggttttaaaaaattcttcagaattacctttctaccagcaaatggtagttcagctgtgggatcagctgtcttggaaataaatactcttttgattgggaaacaggaagtgtaggaatctgtacatgaatcaattgcagttaagccccctttgaggtctggacagtgaggggaagtgtgtggagcaggtggggcctgaagagccggttgaaggccacggatgcctccgagaggaagtcggggtgtgggagggaggctgggcccccgtgatcggatccacgctgccatcgtgttccctcagttccgctgctgtgctttcgggtctcctggagttgatgactggtgtgagatggaagctggttcctaacataatgttgtttctgctccaacaggcgagagggcttctagacaaataagcgggcccagcagtaagtgtgggtgtgagttcctgggccggtgtatgtaatgtggcgtttttggctaaggaatatcttttggacaacttttggtgagaatgcagagtaatgaacaggtggctcggcgtggcacctcaacgggaaccccccaggagccgcaggcctgcgctcgacaaaaccccctcgtgggtcccccaccgcgccttccttctgtccaccgttggactgcgtccctgtgcttcccccgagacccccagccgcagagccagccacggctccgcgggtcttccgcagcgctccatgcggggcagacgtcagggctggcctggcacggtcacccaggcgtgtggggcgtggggcacagggcgacctgcctgtgtggcctgttgtccagcgggtctgatgcagccggctcaggggctttgcacgggccacggaggggccaccgtgacgcccaggcggagctctcagagggctacagtttgcctggcccagagccccccaggtatcaccagcagatcagaggacttcagattctcctcggaaacctcaccttctcccggaagctgctttccaggctcatttttagaaagttggtcacagaagttttagcgttggggcctggtgtttgcctgaagcatccagtgagcatggagcctgggggcggggggcacagtggatgccagtgaacatgggtggtcagtcccagagctggcgtcttgcagctggggcagatcctggggatggtgtgtgtgtcctgaccagaggccaggctggaggctggaattggcgtcaggatgcccagctccagctccaccccagtccctgcctgtggctctggggaaagaaagacctccttattgatttattgatttattgatttgacagggtcttgctgtgtcgcccaggctggagtgcaggctggagtgatctcagctcactgcaacctctgcctcctgggctcaagcaatcctgctgcctcagcctcccaagtagctgggactacaggcgtgcgccaccatgcctggctacttgtattttttgtagagatagggtttcatcatgttgcccagattggtcttgaacttctgacctcagatgatccgcccacctcggcctcccaaagtgctgggattataggcgtgagccaccgcgcctggccacctccttgatttattgacattactgttctctctccggtgcaggagactgcgtggctcccgtcctcttgagggcatttctttacgatggggaaggcgggactggggcctggctagcaccatccccaaggcgctcagcctcagcggaggggcccttcccatacgaagacatcctgagcaggtctcacctcccacccctgagagcttctggtcgcacctgtgaggtgtggctccatcgcagctctgtttcttttctctttgttatggctctgccccctgagtgtctggaatttccagaaagcagctgtgactcctgggattgaggccacggtgtgtcctcttaccaggctgccgtgccgtgtttcccacctacctggggcgctagaaccatttctgttagtaaatacagtgggtttgtattggtattttgagaccctagatttttttggcatttatccgtgttggtttctgaaccacgacttagcggaaagacagcactgtccttgaataaagtatcttccagccagtgcagttgcaccaggagatgaatatagaatttccatgtgcttgtttgtattatttagaggcctgggaatacccacctctaggcatgtaatcatgaggttccaagatgtcataaaaagtcttttcaaatcagaaatccagaggcacgtctttcctgttaaaattactgatttccctaataatgattttaaaaaatattttattgagtgtaattaacacataatgattcttaggactagctgtgtaccagaatcttctgttttgttctaaaagatggattcgtaggatatgagccagtatcagaatctccatgagggggatttcacagtctgtgttttcatccaatccttgaggagttttctttgtagctggtgattagggcaccttgacagtgataagcctgttaaaatctgtttacatatgtaggtccttagatctaaaacacatccaccatccatcatcatccatccatcatcaaaccattactcctccattccctatgcatccatgcatcatcatctgtccattattcctccattccctatccattcattcatcatccatccatccatcatccatccatccatcatcaaaccattattcctccattccctatccatccatccatcatccatccatcatcatccatccattattcctccattccctatccattcattcatcatccatccatccatcatcatccatccatcatcaaaccattattcctccattccctatccatccgtccatccatcatccatccatcatcatccatccattattcctccattccctatccattcattcatcatccatccatccatcatcatccatccatccatcaaaccattattcctccattccctatccatccatccgtcatccatctatccatcatcatccatccatcatcaaaccattgttcctccattccctatccatccattcatccatcatccatcatccatccattattcctccattccctatccatccatctatcatccatccatcattatctatccatcatccatccattcctccattccctatccattcattcatccatccatccatccatccatcatcattcatccatccatccatcatccatccattattcctccattcctcgtccatccatccatccatcaccatccatttatctatccatccattcatccaccatttacctatcatgcctccatccccaatgcatcattcatccatccatccgtttagctgtccatccatccatcatccatccattcatccacccacccataatccatctctttatccctcattcctcccttgtttgtccatcaccatccatctacctactctccatctacccatcatcccttcaccccccgtccatcatgatccatccatcagtttctttacctgtctatccatcatccattgtccacccacccaccaaccatccatccattaaacaaattgaacacattttatgtgccaggcacagtctttggctctgaaaacagcggtgagcagaatagactaaggcgtccagatgttctgtcttcatggaacttaggtttctgtttgtcaaagagatgacagtgtgggatgaatgagtaaaaacaggctgttagattgtgatacgtatttaggagaaaaaataaactagagaaggatggcccacgtgttgagtttggggtttaaatgaagatggggtggttgaggaaggtggtttttgaatgaagagcggaacccgtgaggacccagtcgcctctctctgggaaggacgttcggatgaagatggggtggttggggaaggtggtttttgaatgaagagcggaacccgtgaggacccggccgcctctccctgggaaggacgttcgggggcttgtgctgctgttaggggaggaggggaggtgggcagtgaggggctcacgggagccttgttggccaggtgggactggggctgtcactccaagtcgcccggagctgtccggcagcgtggtctcagggacgtttgctgaggcccgctccttggggtccgttggtcgaggccgggggttgctggccggccctgagttcatgggtttctgctttgtgatgcccagcccctcatgctcccatctgcttctttttctctctagaacactatggctatgcatcctccaacgtcagccccgccctgccgctccccacggcgcactccaccctgccggccccgtgccacaaccttcagacctccacaccgggcatcatcccgccggcggatcacccctcggggtacggagcagctttggacggtgggcccgcgggctacttcctctcctccggccacaccaggcctgatggggcccctgccctggagagtcctcgcatcgagataacctcgtgcttgggcctgtaccacaacaataaccagtttttccacgatgtggaggtggaagacgtcctccctagctccaaacggtccccctccacggccacgctgagtctgcccagcctggaggcctacagagacccctcgtgcctgagcccggccagcagcctgtcctcccggagctgcaactcagaggcctcctcctacgagtccaactactcgtacccgtacgcgtccccccagacgtcgccatggcagtctccctgcgtgtctcccaagaccacggaccccgaggagggctttccccgcgggctgggggcctgcacactgctgggttccccgcggcactccccctccacctcgccccgcgccagcgtcactgaggagagctggctgggtgcccgctcctccagacccgcgtccccttgcaacaagaggaagtacagcctcaacggccggcagccgccctactcaccccaccactcgcccacgccgtccccgcacggctccccgcgggtcagcgtgaccgacgactcgtggttgggcaacaccacccagtacaccagctcggccatcgtggccgccatcaacgcgctgaccaccgacagcagcctggacctgggagatggcgtccctgtcaagtcccgcaagaccaccctggagcagccgccctcagtggcgctcaaggtggagcccgtcggggaggacctgggcagccccccgcccccggccgacttcgcgcccgaagactactcctctttccagcacatcaggaagggcggcttctgcgaccagtacctggcggtgccgcagcacccctaccagtgggcgaagcccaagcccctgtcccctacgtcctacatgaggtgagccggcagcgcggggcgggacggggaggcgaggggaggcgcggggcggggcggaacgcggggagcgggacggggggcggcgcggggcggccgtgtctggggacgagagtcaggacctgggtgggcaggtgggctcctcgtggagctgggaggcagagtctgtccccatgtctgcctcctcatgcagacttttccttgtgcgcctcgcctctgcctccgtctgcgcgtttcccatctgaagtctccagatcctctcgggccctgctgatggcctcgtgttcgctcagtctctgcaaacacccatttcaaagagggtggccctgctggcggtcagggcttccacgtgggaattccgggagacgccatccgcccctaaggagggctcacacacgcgcagtttcttcctcggggaattgcacgtgcctggcccccctcggtggttgcctgctgctcccgcttcctcccctgcagtaattgccttccctgcctcgggtgcagatgggaccgcagctcaacagtgccccagagcacccagtccgccacgctttggaacagcacggcctcctgctccccagagacgccggctgtggcatcaggctgggggagctcacgcgccttccttctttgggtcccaggttgttggtttttctttttaaccgtgtgaggggctgctggaattccgctgggtccacttaaccagcttggtgtttttatctctaacgaaacagctttcccagctggtgggctgtgagtggcccctgagagtgctttctgctctgggatttttatctgaggcatgaaaacgtccgtgcaggaggtcgagggcagtgccccatggcccgtgacgtcagggctgccgctgtgtcctcaggaagaggcgtttgccacgcgcagcccggggtattccaggctgggtgttttcctgtttttgtttttttttttttttcgtccctccccaccccccactccttttttattagcgagcactcagggggcgagaccccgcagagcggagggcaggtgcagcccccatgcctgcagggtgaggaaggcaggcagtgagggtgctctgggaggacccgtctctgctctgcagtctcaggccatgcttcagccatggctggagcacgcatggacagaattagagctacaagcagtaacaagcctccaggctgggaacgaacccacccaaacctctctgaaggcttgtggcaaagaaacagtgttagagctgacagttctttgagcagccccatggctgattctgcctttctactggcgtgatacttagaatcgtcgtcagctgaggtttcgagagaaagcaaggattacccctgatttttcttgacttgcagtgggcgcatttacctttctatcccaacttctgtttttaatacattaaggtttaaaaggctggcgtattctaggtgatcacaacgagcctgtgtcaggacccggattgtatttacaataaaaatcccattcagttggaggcattgggaaaatttaagaactgtttttgcctgctgtactatcactgttattgtttaagtaaaagtacaagcgtagtggcactgactctccagcccacagtcatgtacaacgcgcttcatggtctccaggcttacggacggtgacaaagtcgtccatcaccgcggaacttcactgaactggcgagataagggaagagtgatgtcatcaaggtcccaagactgggacttggcatgaggagtgtcgtaatgcagttgtgaacctttgggtgaaccccacgtatttgtttcctggggctgccctgacaaggtcccgcagacgggtggccttcatagcaggaaggttttctcgcggggtcctgagactggaagccgagatcaggggctgttcttttggaggctgtgagggagcatctgcctgacctgtctccctggcttggaggcgccgtcttctccccatgactcctcatctctccatccaccgtgcatgtctgtgtccagatgtccccttttgtgaggacactggtcctgctgggttggggccaccctggtggcctcatttgaacttgatcgctctgtaaagaccctctctccagacacagccccacgctgggcaggactccattatgtgagtttgcggggagcaccgttcggctgcctcagccccggtcttactgtcgcagtaaaaatggcaggcagcctttgaaagcgcaagctcgtcctggttccttcttcgtctcctgggcggcaaggtgtccgcagggatgtcgtgttctggcaggcacagcccctcctgtccaccttggacctgtgtttggtgtggaggttggaaagcatgggtggctgtttattttttcctctgcttgggggtttcaggaagaattccgtgcccacgtgaccctgttagctttatctcctggctgcagagcgcccagttaggtgtgatgcctgtaacatttctgagtgttcacacaaacaaagctcagtaaatatgtcccaaactcgctcctggggtttgcagttaaccttttcccactgttctggttccacatcaaaatatgtttcctggttccttgtgccctgtttccaagtgacctcgtcagcgggtgccctggggcagctggaagccacggcagagatgaaatgttagttttttaccagcgaggtggagaggccagacttccttccccaggaatgcctctccgtcggtcacatgcagcagctctggcaggcgtggaaaatgtcaccaggatctcaggctgcacaactagaaagctgtatttttaatgatctccaaagtttgggatggagaatgcacgacatgcccatcttctccccaccgtggtacagaactgctgctccattaatcctgtccctatgccagaaggagctttctggtggaaagtgtgctgtgtgcatccttcccagggaccgtctaggattgttgtcctttgaggccttttgttgcttgttcagcacctgtggcccccagtgctatgcagagcctctgagaggcccacaatggtcaaagaacgatactgaattcttgctgcaattgaagccatgataatgtttgtgaagttagtaagagtaggtgatagaaccttgatagttttagagtttggagccattttagagctcagcggaatgatgtgtctattgtcaaagcttggggggactggcacaggaatcacaggccacctgctataccccctaaaaattagaatcttaagctgtgaattctggcatcagaaaggagtggttttcttcccgccttgcttctttccaggggtaatgacggtgatcatagcaagtggcctcccagggcacctttccgtgtgctgttgagggtgcaacaggaggcgttgccgggctgcgtctggaggaggccagggcgagagtgcacgttgaaggctgtgcgggttatttataaatagtggttctcaaatggtagcttttaaagatttcatattgaccgacaggaactaaagtctacgtgattgcttcctcattccttcatcgttcggcctcctccacctgggcacctgccacaggccatgtgcgtccatgtccaggtctgtctgtgccgacatctgctctttgggcatcagcctctggaaagtgtccctgtcagagtctccacgtgtctcactctccgcacccagacagtctctggagttgcctttgtagaggcaaggttgtaggggaattggaaaggcggaggtattttgactgaatttattggtaactttaacagcacaattcttgaattcaatttctttttattttatttatttattttttttgagatggagtctcgctctgtcacccagactggagtgcagtggcacaatctcggctcactgcaagctttgcctcctgggttcacgccattctcctgactcagcctcccaagtagctgggcctacaggcgcccaccaccgcgcccggctatttttttgtatttttagtagagatggggtttcaccatgttagccaggatggtctcgatctcctgacctcgtgatccacccgcctcggcctcccaaagtgctgggattacaggcatgagccaccgcgcccagcccttgaattcaatttctacacatgaaacattgcctcttagaactgaatgtttaaaaagaatttctaaggagtgaggtaaagaaaaagaattcctaaggggcgagataggctaataaacaatgtttacttagagtccgcttggtttcaatgatcagaaatagccgctaggttggtgcaataacgtatattcaaatctcttggccaggcgcagtggctcacgcctgtaatcccagcactttgggaggccgaggcaggtggatcagctgaggtcaggagttcaagaccagcctggccaaattggcgaaaccccatctctattaaaagtacacaaattagctgggcatggtggcgggcgcctgtaatcccagctactcagaaggctgaggcaggcgaatcatttgaacccaggaggcggaggttgcagtgagctgaggtcgtgccactgcactccagcctgggcgagaggagcgagactccgtctccaaacaaacaaaaaaaccctgtttatttcagacattaagttttgggctgcaatattgaagattttagcatatcggtcacttttctgctatgcatagtattagtttcaaaaggtctgagaaaacgttcactctcttgtgtttcataagttatctgaaagtttcacagtttatcacaatttggaataagatcagctaacccccagcacagtaacaggtggactctgtcttctctttcgcagacacgagtcctctgccaggctcagtagcgattcctcctgcgtttgaatgccctttgctcttgtggctctggtacctgaggggttcgggccccggcagtgttgggggaacagtgcaggcttttgacagctcccaggtcctgtagtggggccatctctgggctctggagccagactgtccgcgggcgctggtgggccctttggggtgatggtgaacatagtctctaaggcgttgtaccgaaccccagcatagcgagacgtgtaaggtggtagccgtggggtcttccccgagcttcccgctgccatcacctcctgggaagacggatagcaaagaagccgagggtgtcgagttgccccatggtttgtaaaacactggcatgggctggaacggctcaggactgactgccactgcgtctccctgtaagcccctccctttctggggagggaagccccccaacaacccacagccagcctcgaagccacgtcgccctggctctggttcccgctaacccttgctggggagtcccccgcacaacctgtcctgctgtttcctgctgtttctggagctagacaagcctcagctggcctcctggctcccggcatgggtgtcaggccctggggagtctccagtccctcctgtgggtactgggctgggctggctctgaagggtcttgaagaacgtggctgtgtgcctccctggcattcgcggtggtggctctggagcttgcgtttggctgagcaggccagcaggtgactcgcgcaagccagacggtccccaggaagccctcagctgtggtgggagatgggagatgggctatggtgggagatgggctgtggcgggagatgggctgtggcgggagatgggctgtggcgggagatgggctgtggtgggagatgggagatgggctgtggtgggagatgggagatgggctgtggtgggagatgggctgtggtgggagatgggagatgggctgtggtgggagatgggctgtggtgggagatgggagatgggctgtggtgggagatgggagatcggctgtggtgggagatgggagatgggctgggcaggagatgggctgtggtgggagatgggagatgggctgtggtgggagatgggctgtggtgggagatgggagatgggctgtggtgggagatgggagatgggctgtggtgggagatgggagatcggctgtggtgggagatgggagatgggctgggcaggagatgggctgtggtgggagatgggagatgggctgtggtgggagatgggctgtggtgggagatgggagatgggctgtggtgggagatgggctgtggtgggagatgggagatgggctgtggtgggagatgggagatcggctgtggtgggagatgggagatgggctgggcaggagatgggctgtggtgggagatgggagatgggctgtggtgggagatgggagatgggctgtggtgggagatgggctgtggtgggagatgggagatgggctgtggtgggagatgggctgtggtgggagatgggagatgggctgtggtgggagatgggagatcggctgtggtgggagatgggagatgggctgggcaggagatgggctgtggtgggagatgggagatgggctgtggtgggagatgggagatgggctataccaggagatgggctgtggcgggagatgggctatggctgggcctgtcctctgtggtgctgtggatgcgtcctattcaggagctgcctaccaagtttcattgcgatgttggaatctgtccttggtccctgccaccatggggtgggtggagcccccagcaccctgccttcttcctccccttcctgtgggtctgcagggctcggggtgttgatggagactgtgggggtcgggggagccagcagtttcgttgtgtgatggcaggaagaatccgcgtgctgccccaccatgccttgcgacgctctgtggtagggagctgtcgggtcacagtcaggcgcttaacggccacccgactgtggacgcagctgaggccatttgtccagggtggcctagtcacaaccaacagaactggactctgccatgatgagcagaccccgcaacctacactccagactccaccggtgctgggaccccgactcccaggagacctggcgagctcagccctcttgtcacaaggcctgtacggggtgggggcacgtgtcacggggaccctcggcccagactggccttctgctctcgtcaccaagatgtggagccttctggggtcagagcccagtcgaggggctttacgcagcctgtggtgtccttggagccacagctccctggagaaggcactgcgtctgccagcctccgctggtgaggggctcagagttgagaagatcatgcctcctgattgcacgagcaccctggtcttggctcatttgctccttcttgagccgcttcggtagcatttggcagcccacggttttctgcctgcgttgtttagtttgtttctgctgttatggagttcacagctgacacttggagggcggggtttgcaacaccagtttctgatgggaaggactggtgtgagggtgtgaggaggctgcggaggccgagggcctgtgcgttctcccaggcgtgtgtggaagggctggggcatcttctccctggtccttctcaatgttactctgtccatgtctgttgttagccatgaggaggagaaggcactctgttcctggaaaggagaaaacaacgtggctttttgctcagatatttttttttgagccagggtcttgctctgttgtccaggctggagtgcagggtgtcatcacagcttactgcagcctcgacctcctgggctcaggtgaccctcccacctcagcctgccgagtagctgggaccacagacgtgcggcaccacacctggctaattgtttaagttttgtggagacagagtcttgccgtgttgtccagggctgatctggaactcctggcctgaagcagtcctcccgacctgtcctctcaaagtgctggcattgcaggtgtgagccagagttttacagtcagatcatggagatctgaaatgttgccccatctcaccgaagaccgagtgcccgggagcccccctaggagggtcagaacctgcccgggagccccctaggagggtcagaacctgcccgggagcccccctaggagggccggcacctgcctgcccgggagcccccctaggagggccggcacctgcctgcccgggagcccccctaggagggccggcacctgcctgcccgggagcccccctaggagggtcagaacctgcctggttagctcagatgcccccgtggagacagcgtgagggcggcagggagctggaaaccttcccaggttcccaattttgagatttcctaagctgcctgtggtccagctgggaggaagtgtctggtcctgatgtgcgtcggtgaccacagacaaaacaggatttgctcctgcgccaacgttggcttttgagcagcgggataggtgggcctggtggtaggtgcttcggcagccgggcagccgcagggacttcctccctcgggattaaacctgagtcgggagttggagggcaacagttattcacattcaaaaccagatcttaagtgcaaattaacgttttttggattcttgagcaaaatgttttctacattatgatgggattttcttttttataagtgcttctagaacatctctggaagctgggttagacgcacagggcttagtcggctttggggagagacagtagttgtaaaggccacaccggacgccgtgtgcacctcccaaggtttcccatgtgagaccatgtggcctgcatgctgcgttccatcagcactgggctgtgcgacagatgtgtttccaggcgaggttgctgcagaggggaagagggggacgtgtttccaggcgacgtcgctgcagagaggaagagggggacgcgtttccaggtgacgtcgctgcagagaggaagagggggacacgtttccaggcgacgtcgctgcagagaggaagagggggacgcgtttccaggcgacgtcgctgcagagaggaagagggggacacgtttccaggtgacgtcgctgcagagaggaaggagggtcgcgtttccaggcgaggtcgctgcagaggggaagagggggacgcctttccaggtgacttcgctgcagagaggaagagggggacgcctttccaggtgacttcgctgcagagaggaagaggcagacgcatttccaggcgaggtcactgcaaagaggaagagggggatgcgtttccaggtgacatcgctacagacaggaagagggggatgcgtttccgggagacgtcgctgcagaggggaagaggtggatgcgtttccaggcaaggtcgctgcagagaggaagagggggtcgcatttccaggcagcatggctgcagagaggaagaggaggacgtgtttccaggcgacgttgctgcagagaggaagaggaggacgcgtttccaggcgatgtcgttgcagagggcaagaggggaacgcgtttccaggtgacgtcgctgcagaggggaagaggcggatgcgtttccaggtgacattgctgcagagaggaagaggaagatgcttttccaggcgacgttgctgcagagaggaagagggtgggacgcatttccaggagacgtcgctgaagaggggaagagggaggcccctccagcagggccacctagatgtttgctttgccccgcgtggagtcatattccaggaacccccgaacccacctgcagcttgattctgctcctcagggccagaggttctagtttatgggaggagtgttttctcactggaaacatggagcccacacacacttctacgctggaagccgtgatgtgtgtcaggaacgtgttctgatgttggtgtgcaaaatcagtattgtgcctttgtcccctctgacccccatcacggcagttctgaggcttgtggggcaccccagctcctctccctctgcacaggccactgttcccagaactcgagggttccctgacaccaagatgacatgtggcacagacctggaatcacgaggaaatgcccgtcctcctcccacgggcagacaggtcgagtgtgtttccagagaccgggccgtccgtggggcagtagcgcctggatgacgtctgctttcgcctggagccctggctgcaaggggcggtgccgggcaagggccaccccaggggtctgggagtgcagtgtcgggcctgtggaggtggagagcagggatcagcctctttttgtggatgaggaaatggagacacgtggaaacttctggtaagaagctgtcaagcctccaggtttcggttctggacaggtgcggggcaggtattggagcactttgggctctgaggtccacgtggcccagcggcctccaggagtcagctgcaaggcggagtccctgtccacaagctgcgttgcaggcacagagaccaggagagggctgtgaagcaactctgtgtttactgggctgaagcagcagctcttggcagtgccgccaccatgggctgtgtcctgtccccgtggcgacatcacagctgagcgcgaagctggaagcttgggcacgtcttggtgctgggtcttctccgaccccgagggccaagggtgctctgtagctccaggcgtcagagtctgagcatcctttgttttggcaacatccaggacaggagtctttggagagtaacacatccttattttgaaagatccctttaggtgatttgagaaaccgctgtatttgttgtagctccaagtattacccgtgaatcacctaggctgctcttcagtgaacatccagaatgccgtcagttcttgtgaaacccccaagtttcccgtaggtccaagctgagaagattgagtgaactctgagagctgagccgggccgtcttggcaccactagaaacggaatcagttccatgactgatctgtgccccaccccacattaacttgtgcaatatgacatttctggttttggtttttgttttataagccatccatggcaagtgcagtcggaggccccccactgccaaaacttcctgtgagtaataatgacagatgggccctgaccctggagacgtctgagaaggtgtttggggtccgagaagagtccgcgtgtgcagtgactggaacctgtccctggtgtgaacttggggatgagtgggtgacgggggtggtgggggcctggggcacttccccgccctccggaccacactgttgctctccagccacgagaagatgcagcggcccccggctgcagcagctactgtcccggagggcaggggagtgagggagagggagggtgtacggcatggggcctgctgcctggggcgctgggatcccacagcgaggccctgttcccactgcccaggggcactgagatcccacagggaggcccggttcccactgagcttgggttcccaacgggctccttttgcttcccaagcaccctctcccacccttgagctgcaaggaatgtttcagagccatggaaggtgctttctcccatctgtagtttttctgggagggagaaaggctgacatcgggggctttgtagaaagcgtgctctggcccacacgttaacatttgggaggaggcctacagggagctgtcggctctgggcgagggctgggggctgcctcgggggcgggggttcagggtcttgagctcagcttctcacccatccggggcagggcagggcagatagaggggtggggacagtgttgggggctgctgggcctgggatggcagggcctgtgtccaaagctgttgtgaggctcacgagatacaggggtggacctgggagggttggggcgcgtacagaggggatgacttcgatttttccaaagaacagggaagggtctgtgtcctggtcgtactccaatcccgtgtggtggagccacgggacgccatcagtttttatgaaatccccaaatgtgtcctttaaaacaaaacctctgcactccggcctcacagcccagatcccgcgcgctcccggtctgtggctttgactttggtttgagttcctgggctgggcttacctggctggcagggccgcagctgtggcactccctgtctggggacggaggctgcccatgcacccggctgtccaccttcttcccaaaggcggcgtcctgggctccctcccatgcggacccgggatccacttgcccagccttggggaggacagatggggacagcagatcctgccccagggtcattgcccgtggccacatcggtcctgggaactgtgggtaggccatgggccgctggtgcctgcaccactgtcctggtggaaggggctggacctgggactgcctgggacaagaggccaaggcacagatggctgcaggggctgcccctgcatcctgagcctcacccggcgggcaggagggccgggctgggtgtccccatctttctgttcccaccctggccccagtcacctgcttctcatccaccgattccatctttcctgctggcttgtgaggcccgtgccctcctctgggccgccttccctcccatgggcacagagcttgggtcccacgtggagaggaggccctgcccgcagcctcagagtcaggcggccttggcttcagggagggttggacgggagccagcccattggacagtagcccggggcctctgggtgaccctccagggtgggacagcagtggtcccaggcccccctctgactcctgaaatcctaaggttgcccgggccgccgagccctccctccactccccggcctgctgggcaggattttgtgaaaggccttgtcttgggtcgtggaagaaaaccacgtggtctgtggggtcatccctggggcaggctgtgggagggtgaaggctgcgtccagcggccaggcccagccagaggtcgggaatcatgtcgggggtgacgcacagatgccgccgcactatcaccgagaaacgcggcgtgtgcgggcccacctggcctctttaggccgggctccgggctgccctccaggaaggccgacctctcctgggcgggcaaaactttctcagggccgagttctgccggcacaggtcagggggcaaagctggcctccgaggagcctctgaccgctggccactgtgtggtcttggggcagctccagacacacaagcccagaagacccagaggctgcctcacgtcggagaaatgcgctgatcgtctctctctctctttgtctctccatctctgtctctctccgtctctgtctgtctctccatctctgtctccctgtctctctctctgtctctgtctctctctgtctctgtctctccatctctttctctgtctctctctgtctctccgtctgtctctctgtctctccgtctgtctctctgtctctctttccgtctctgtctctccatctctgtctctgtccctgtctctgtctctctgtgtttctctgtgtctgtctctgtctctctccgtctctgtctgtgtctgtccctgtctctgtttctctgtctctctctgtctctctgtctctgactctctgtgtctgtctgtctctgtctctctgtctctctccatctctgtctctgtttctctgtctctctctgtctctccatctctgtctctttctccatctctgtttctccatttctctgtcgctctgtctctctgtgtctctctctgtctctgcctctctgtgtctgtctctccgtctctgtctctctgtctctctgtgtctatctctgtgtctgtctctctctctgtctccatctctctccatctctctctccgtctctgtttctctctctgtttctctctctgtctctccatctctgtctctccatctctctgtctctgtcgctctgtctctctctgtctctgcctctctgtgtctctctccgtctctgtctctccatctgtctctctgtctctgtctctctgtttctctccctgtctctgtctctctgtttctctccctgtctctgtctctctgtttctctccctgtctctgtctctctctctgtctgtctttctttcttactctctttctcttttaactaagggaaaagccgtcacacaaccaaatggccatgaggcccgcggctgccggctgaggagggctgcgggaggaccctgaaaccctcgccctcctgaagctgctcctgtggagtcctgtgggcgggtgtggccctgccgagttcagagtctgtcgcttcgtctgtctggaaactgcaggagtcatgagcagccttcacggttttcacctaagcaatgagcacgtgcgggctttaaccctcggaaaatcagaattaaaggattttacccaaaccacttaaacaaaggaactgcctctgctctgggcttctgctgccgagggcgcgattccgggattctcatcgttcaccggcggagtcggggcgactcatgaggagagtgttttcagatgctggggacgtggcctttctaagggagagggacatggcagggcctcaggctcagctctttggaaactgaagcccattcaccaggtgggcgggggaggagctgggcagaggttgagacacaagacctgagagcagagcaaagtttctcatttttttggttgtacaaataacaaacaccgttcactgtagaagacttttaaacacagataaaccacgataaatgagtcctgcaccagcgtggcagctcacacctggaatcccagcgctttgggaggccgaggcaccaggatcgctggagcccaggagtttgagaccgccctgggcaacatggagagaccccatctctacacaaaatataacaattagccaggtgtggtggtgcgcctgtggtcccagctgctcgggaggctgaggtgggaggatcccgtgaggccactgcactctagcctgggtgacagagcgagaccctgtctcagaaaaaagaattcgataatcctgcgattgagaatcagacagtgatcatttcaggatatgtctttttttttttttcctccccctctgtcccagcgcagacggcatctctgtcgcgagctttcggctgaaaaaaaatccctcacgcccttcccaggcgagggagacacaggttcaggggcatgaacggctcctcccgtggaaaggactgtgtggccggctccccaggccacgggggccactgtcctccatgccacgtcccatgccgcttccaccgcagcgtgaggacagcaggacctgagccacgagccacactgctgtgggacccgtgtcgggactcgcagggcctggcaggtgtttccatttgacctgtgggctcacactcggcagttctgggccccctggtgtccacctccatgggagcaccgtccccggacccccagaggggcggcaaacacaggagtcctggggagtgttgccggggcgggaagcccggacccccctgtgactcagctgcagcctctctgggtgttgctgcgggtgtggaggttgcatctggctcagtgagaagcatttttaaacttgattctgcagccactgcagattcgcgggaagctggggggaggcaatgccccacccggcccccggggctgccccatagcagccaccatgccctggccccaggccccaggaggaggatcctgccgggagcgccttgcattttgcctaggaccttcttaactctccagactcatcagggaagctctgcaggagctcaggataaacaggtccttggcttgaagcctgccggcatgggttgggaatggtgggggctccatgtctgcagcagccacggcagaagctgtggccacatgagctgggctctgggtgcggctgtggccattgaggagggagcatgtcccgggttcttaggttaagtgcgtcttggcaggggggcccggggctgcagcccttcgtgtacccacgtgtccgatgtctctgtgccatgccgtgacgttgtccttcacgtaaagttttcaagacccacgtcccattgtctgtgaaatcacaaggttttactttatggactgtgtggaatggacccagggaagggggaccagtatatgcccaatttgccagcatgtgcaacagtgaacttccctggacagctggccttggtgtggcagtgggtgctgtacggctggcctctgtgcagtgggttggggggagctggatggctggcctctgtgcggtgggtgggggggagctggacggctggcctctgtgcggtgggtgggggctgtaccactggcctctgtgcggtgggtcgggggaagctggacggctggcctctgtgcagtgggtggggggagctggacggctggcctctgtgcagtgggtcggggggagctggatggctggcctctgtgcagcgggtgggggagagctggacagctggcctctgtgcggtggaggctggacggctggcctctgtgtggtgtgggggctggatggctggcctctgtgcagtgggtggggttgggggggtgctggacggctggcctctgtgcagtgggtgggggggtgctggacggctggtctttgtgcagtgagggggctggacaactgccctctgtgcaggggtcggggggagctggatggctggcctctgtggggtgggtgtagggggagctggacggctggcctctgtgcagtgagtcggggaggggggtggctagacagctggcctctgtgtggtggcagggctggacagctggcctctgtgcagtgggtggcgggggggtgctggacggctggcctctatgtagtcggggaggctggatgactggcctctgtgcagtgggggcaggcgctggatgactggcctctatgcagtgggtcggggggcctggacagctggcctctgtgcggtgggttgggggggcctggacgtctggcttctgtgcggtgcgggggccggcctcgggccggtgggcaggctggaaggtcagccaggccctgtggtgtctttagtgagaaacaggaaataaatcaaggggatgttgtagaagttttaccgctgctggtttagaagtgtttgtttttattatttgtatataatgtgttgttttcagtcttgcactggtgtttttaactatcgtgtaaagatgcaaacagcaggccagaaaactgccttgatatatcacattggcaaagaccaagcgcaccccggaccctagtgggtgagccggacccattggcagtggcctttgtggtgcctccagggagcctcacgatgctcacgcctctgaccagtggttctgcgctcagggcatgaccggagatgtggtctgggagttggttgtgtggatgtttgcgttgccagcgtttacaacaacagaggggaacagcccacagcccagcagtacaatgaggatggtccttgtgataaatgggatgctgtgattagattgtttctgaataagctaaaatgctcaaaatgtgatctttcttttataaaaaggccaggtatggtgatacgtgcctgtaaccccagcactttgggaggctgaggtgggaggatcccttgagcccaggagttggagaatgcagtgagctgtgatcacaccctctagcctaggcagcagagcgagaccttgttctaagaaataaaaagagaaaaagaaaagacaaagtaccaaattatgtgtctcattttcttaagatgtatcattttgtaaaaatgtttatagaaatacacccagtgggctgggcacagtggctcacgcctgtaatcccagcactttgggaggctgaagcgggcggatcacctgaggtcaggagttcgagaccagcctggccaacatggtgaaactgtgtctctactaaaaatacaaaaaattagccggtgtggtggtgggcacctgtactcccagctactctggaggctgaggcaggagcattgcttgaacctgggaggcggaggctgcagtgagccgagatggctccactgcactccagcctgggccacagagcgggactccgtctcaaaaaaaaaaaaaaaaaaaatggagagagagagaaacagagaaaaacaccctttggctctgtgggcgtcggtcaccgtccagaccgggtggacgttcgtcggtcaccatccagaccaggtggatgttggatgcaaatttcacccgagcttttttttttattttttcagttgtgttgagtgtcacttttttaaaaaattgacttatgttgaagatgagtttgaagttgttggaattatctcagtcctgagcttagggcttcagcaagcgagttgccgttccgggggatgggctggtcagagacccccgactgaagcacgcctgcccgaggctgccccaggcgtcgtcccccagaaggaagcacgcggagtggagtggggtggagagcaggcagcagcggtcccgtctccgcagcagtgcaggctcctttcccgctcatttgggctcttttgtctgaaccagagacacagatttgtagagctgccaaattcatgctgaaaatttctaaccaaaaccaatcatcttaattgtctggattatgatatttattttgtaaaccattcttgctgtaagccatgcacacactgtgtcactaaatctgcaaatgattccagagccaaatgcagtcctgcaccgcggcgtcgggtcaacggcggacttcacctatgagggttctcgtgagatcgtgagagcgtagttttactgcatcttttccatgtttaaatgtgtttagattcacaaactgtgaccgctgtggggcagtcacccacggtgttcagtgcagccacatgccgtgcagacgtgtactggggagccgtgggccacgccacgtggctagggtgtgcactggacacaccgagtcggttcacacgagttcccacgacgacaaaatggcctaaggacgcgtttttcagaatgtgtccttgtcataaagtgacacgtggctgcgtttacacaaacttattcttatgtaatagtcagctgcagagtggtttagactgccttatctttaggaaatgtgtctgcctttaaccagaccagcggtggggggaggcggcttttcttttcttctttcctcctctctcctctctctcgctgtctcttctctgtctcttaactttcctgggaatccagtgagcccagttttttcactgtgaattttgtttttggtttgtttgttttgagatggagtctcactctgttgcccaggctggattgcagtggtgcaatttcggctcactgcagcctccgcctcccaggttcaagcaattctcctgcttcaccctcccaagtggctaggattacaggcactcgccaccatgcccagctaatttttgtatttttagtggagacggggtttcaccctgttggccaggatggtcttggtctcctgacctcaggtgatctgtctgcctcggcctcccaaagtgctgggattacaggcatgagccaccacgcccggccatgaattttgtttttcatttgtttctttttcaattcatagcaaaagataggtgcaaggtgcctgagacgggcaccgcctcgcatcatctgcgactttgtttggtgcctgcctgtccaggagcaggtgtggccactgcagaggggcccttcattgcccagccctgcagctgccccctctcccttccccagaaactcacagctggccgcgagctctgtgcagagaagtctttctctggaggctcttgtccttcctgtgtggaggcctgggtccagccgcctttccttctgcctggcagcgttagctgatactgggtgtccatgctgatcacctcacgtgggaaacagctctgacagtacagcccatgaagctgcgtcttggagattcctctgtcagggaagctgtcgtggctgagttggggtccagcaggcacccgcagggcccaaaaccccacagagcggaggtgggtggtgagcctgccaggtgcatctttggataaatccatttctgagttttcaaattactatgaagcttccaatgtcacaaaatatgtagtcttgttcttgctaaggaacattttaggtgtttgtatttttaaaaattacgtagttgattccattcaagctgcctcctgggctttttcctctttaaacgagtcttctattctgcccatcgtttttagtttgtttgttttgagacagagtcttgccctgtcgcccaggctgaagcacatgcgatcttggctcactgccatctcaacctcccctggctcaggcgatcctccccgctcagcctcctgtgtggctgggatcctccccactcagcctcctgtgtggctgggatcacagatgtgcaccaccacgtcctgctcatgtttttattttttgtttcgtagagatggggtctctccatgttgcccaggctggtctcgaactcctgagctcaagtgatctgttccccttggcctcccaaagttttgggattacaggcatgagccactgcgactggccttgtttttgttgttgtttgttgtttttttttagatggagtctcgctctgtcgccaaggctggagtgcagtggcgcgatctcggctcactgcaacctcctcctcttcggtataagcaattctcctccctcagcctctcgagtagctgggactacaggcctccgccaccacgcccggctaatttttgtatttttagtagagacagggtttcaccatgttggccaggatggtctcaatctcctgaccttgtgatccacccgcctcggcctccccgagtgctggggttacaggcgtgagccaccatgcccggcccttgttttgtttttaagtcactttgggttcacagtgtgtcctgaggtgtgggggccttcggggggctcgggaggcagtttcctttaacttgcagatgcccctgctctgcgactgcatcgcatggaacctgcccttctcgagaagctgccccgcatgtcccatgtctctggggcttgtacttaaaactgacgtagaatgatggtcagcagctctaggcaataattgagtcctggccagaggggctggttctgaagatgggggagtcacaggccctgtgtggagggtgacctcaggagccccggcccacggtgctcggggtgagcctgtgtggtgaggacagtcggcgggccctgggtctctgcccacacggaggtgaggacggtcggcgggccctgggtctctggccacatagcggtgaggacagccgttgggccctggactgcctctgcccacgcagggtcttgcacctgatctgatgagcagtgctggtccagggagggtcccaccgcatcctccgcctgccttggcccctgcagtaggcagtgctggggagacagactgagcgggagaggaggctgggccggggctgcagcggccacagagccttggccctcccagaaacggactctgatggcagaggcgccggcctcttgcacagggtggaaggtggtgcctgcgtggatggtggtgcaccggggcaggccaccccctagatgcaagaaccccttgggtgcaccgtgtggcccccaggagtgttgagacagtctgcctgggcctcctacagaacacagttgggaagacacgccgagggcacgggcaggacctcaccttagcctttcacaccaaacattcatctcctgaaaagacaggggccgtggggcccccagctgggctgtaggctctgaggacagccccagcacctgtcacccgccaggtcatgcagctcgtgtccctctgtgcaaagtaaccgaacagcctcccacagccctcaccgtcgtaccccgccctgctgcgtttgctcccaccgccctccatggacgccgtgtccctcctcctggccctcagtcagggccttctgtttgtcttgcagcaatcatggaatttgggggctggcggcgctgcgcacatcacaacttccaaacccactattttataaagggcccagtcagtcacctgtctcatggcagccacacagctggttcatagcgaggagaggtttgagcttcctggttcttaggccacagcccatccctcttagattttaaaacagattttcaatgagttctaaaacctgtcttactggagggttaagtaactgatagaagcctgtcatgaaggaagagaagcgtgttaaggttgtgcttggaaaatgtttccatcttagagaactggccgggccgtggccacaggtcacgatgagtaagcactgcattgacacaggcttctccatctccatgtcaggacgtgcactcgccgatgaagtgtccacccaagatggcgacgggtgagcacgggcacgtgtggcccgggcgaggtctgtgtggtgctgaacgcctcctctgctctgttcccttccagcccgaccctgcccgccctggactggcagctgccgtcccactcaggcccgtatgagcttcggattgaggtgcagcccaagtcccaccaccgagcccactacgagacggagggcagccggggggccgtgaaggcgtcggccggaggacaccccatcgtgcaggtaggcactgcggccagactcgcacgtcacttggtgcttttgtggtcaaaaagtaactttggagccacagctaactgtgcttagactctcccagccaggccagctgaatgctctgtcgtggttagtcccgggcggctgctcaccgcctctgagctggaatgggagcatgccacagctcctcctgcttccacacgtgcaggccctctctcgttgttttcagatttgcccgaagcagctctcgtatccgtggatgctgcctgtggtgtggatgttttgggggttgattctcccctctctaaagcctctgaacttggaggcaggagttctcaccagcagcaccagcctcgcctggtgggggaccctcagaaatgcaggttctgtggcccacccaggcttgcaggatcccatactctgggcttgggtgctggggggcaccagggctcaaggtgctccccgaggagaggaggagtggcttccagagcgggcctgggcctggcagccacatccctgccggggtaggcctgggcctggcaaccctgcagccgcgtccctgctggggtgggcctgactcccccgggctgtggtgtggcttcctcaccttcctcacaccttgcgggaaagccacgtggagttaggctgtcgagggaggggtgtaatgaccgcgccagggacgggcagcgtctgcacagagccatgctccctctgcaccccaggtgttgatgtggatcccgggtagccgtgggtgttggcattttcttcgttccacctgttacctcgtcagctataggccccaggccctagatctgctgctttggcagccacagagcagcaagtgtgtccagccccagggctccaggctacgcggcagcacagaggatgttttccgagcacaccccaacagcaaaaaaccgggtgccccagccccgttatttagggaatgatgcaagccggaaggggtgttcagcagagtgcctcgtatttttattttcttccatttagataaatagtggagagaaggtggccgcagggacaaatggctgtttgccaacgcagcagccggcggcagggaattagcgggcagggcgctggggtgaggcgttttcgccagcacttgcagatgatgttaatgtgatgtttgtggcctgtgtgcttgatgccaattagtacctccctcgttggtgcttgaagcaaggaaatgcgggagacacctgagcgcacagtggcccgtttgacatttaaagtctccaccctcccaggtgggaaaggtcagacagcgctgcaccacgctccgtcactgcaggcctgcacctccccatccctgcctcggtttttactgaccgaaagcttgttattgctcagtgggaaggatattagataggacaagaaacgaggctgtgaaaggaggagtggaaataaagcaatagagaaataatggcccagtccaccctatttgctgtaaattatgtcggtgaggggcactgacgtcgcccttttcactgtatctggatgaggggcgggtgtaggaatcgaggctgttacttggagggtaaagcaggaccatgagtgtggagagagctctgaggtttctgtttgttttgttttttggtttgtttgttttttttttttttttgagacggagtctcgctctcacccgggctggagtgcagtggtgtgatctcagctcactgcaacctctgtctcctgggttcaagtgattctcctgcctcagcctcccgagtagctgggactacaggcagccctgggttttaatggatgtattttcacctgcctgtgagtagcgccggtgcctggtgccgcccgtctctgcggacacagctcagtgcttgggtactctccctgcgtcttctggaatcttctggaatcccgtctctggttctgccatctgggtgtcttgggctgagggtgcagaaatctatcaatacagatgccactgagaggatccaggtgttctggaggactcaggaaacttgaaacagtaattaaaaatatctttaaaatgtaccctcaacaattattccaaatcaagtggcccgtgtgtgcgcagcagcgacacgggagaggctggctctgcgtttccacagaaggagccctttccattgaaacgcgggagaaaacggtcccctgcacggagaatgtcaggagctgtcagcatatctcatttgtagaaattagtaatttaaagagttttgtgatgtatctgtggcagagtggatttctgtctctgcaagtgtgaggtaaaagcagctaaaaagagggggttttgggggttagttttctctttcagttggtggaccacaaattggataaaaatagaatttgtgcataatttaaaaacaaacgagaatagaaagctctcagttgccgtggaagctcctcgtaaccgcagacgtgccctcggtgccgtcgggttattttagtacatcctttgacgcggcccctttcccgcttttcagaaacgaggctcatcgcactggcctgggggcgcgaggacgaggccgtgggtagtgggcgctgcgggcggctggtcagagccactgggagccgttgggaacaactggcgcgggagtttcctgcatttgagaaatgctgttctcttcgttgtgaatcgtctgtccgctgcatctcaaaaagcttgtccagaaaattaaagcccgctgtctcctgcagtgcagctgagccctggagggtggcggggggccgggggatgtgggtgtcagctctcgcggccaggggcacgctgtgcccccgcgcccggtatccccgtcctcccgcacccggcgtccgcgtcctcccacgcccgctgtctccgtcctccccatccccatgtgtttcgcagttgggaagtgaagcacgtgagcagaacgcagcaccttctctccaggaagcattcggagcatggactctgggttaggaaagggtgtttgctcctctggataggtgctcgctcttacttgtgggtgctgaggggcgtgagggggtccggcatccgggtacctgtgggcgctgaggggcgtgagggggtccggcatccggggcttctcccatttagggcctttccttcagagggaaggaggccagccccctccagtgagcactgagcgtgccccctgccgtctctgtggggatgtcattgttcccacgccggggagagaccaccccaggccagcccctattcttctggccacattgccatgatcacaccgtccgcaccctgaggccacccccattacggctgccacggcgctaaaaacaccagcatcaaagcaacagggccgtggtttagcctggaagagcggggccctggagccgtctgcgagggggtctgggtggttcaggatggccggcagcccctggtggacgtggtccctgcggggtctggcgggacctcggccatggtgatgggtgcgccccctctgcagggtggggcctgcgggtaaggacagtcccgccccctgtgcgtgtgaggggatagtggagagaggggtctggcgtgggcctcactgctcctgggaaaccaaagatgaagacgcctgcttaggactcaccttgccctggtagaacaagtgactcagacagagcctcccagaggcttctggccaggcagggagtgaccagcagcgcagccagcctcagctcctgcccacacagcccccttgtcaccggctcctcctgcccctgctccagcaccttggccaccagttctcggtgggccggtctggatctgccgatgccgggacctcgccaggccgctggttgcaggggaggctgagggggcgtccgcctgctgtctgcttctcaccagcatttccagtgaggcatgaaagtgatgcgtggcggatgtttccctctggcctcagctttcccccaaatcccagctcacactgagtgtcctgatggtggcacctcgggcagccgccaccctctgccctccaccctctgccctgacggcaggctctgcctgagggggagggtctctctgtacacacagtctcctcaccctggagggcctgctctgctctcaacggagctggaaccaggagttcgcgagtgctctgggtggctgctggcttttctccttgtctcacctcctcatccgcacacagcctctgccctcagcgctgctcacctcggtatgtaggcagccggcatcaggatggtctggggtgagacaggcagtgttcttccccttctctggccagggagggtggagaagcacccgggcacagccattgaggccttttcgtgcaactcattgcctttctgggcgtgaaggtggaggctggtcctccacctgcgtgttctccatctgggggactgtggtcccggaggagacctggagtccggctccccgctccgtccgaggaggagctgagcggcgtgagcagtgcccgccctggtcactctgccttgctttcctcctctctgtttctggttgtgcctccttccttccctcctgctctctttgccgtggactgcagccccctcgccagatgtgttcctcacatgagtcaacccgtccttggcctgcgtcctccactgctcgtggcagctacactctcccggaggtggccgggaagggcccagggccttgagaagatgtctttgcagcacgtccccggccctcggcctccacctccatggcacccaccatcccacgggggcacgtggacctctgtgggatatagcctgacctctgacccaggggtcaaataactcaggtctgtttaccaagtcaccaaaataacctgcccgatagcatctcacccatcacacgggaggccgggctcgtgtgaataattaataggtcactggaatgtgaaacgagaagcctcggcccgttctgaaacagcattttaggtttgcagcttataatattgtcagttaggagaagggccaactgagtctgcaaagaggtgagggcgggtggtctgggatcctgcctcagccgcgcgggtgagaggggcgggcgggtcaggcgaagactcagagtcaggaggccagactggccccagggagggctcctggccataccccaagctcaggacgcagggtggggcgggcccgctggtgcccacagtggccttggtgggcctctccttccattgcccagcttgtaggtcaactttgcctccacagatccgtaacagacgttttttctgtcatgtaagaaacttgacagctgaagaccaaggagtggagcctcccgtgaggcagctcttcttttccggttgttaaaatgcgcgtcgggccagtggttctgactaattctcactttgtgtggtaccttcagctggcaggggctcggggagtgttcagtaccgtgaggagcaggttcctgagagcccgtgaataccgtggacagattaccacagcacgcactgttccacgcagggcctcatccacgctttcttaagtggtttgccacacacaggagctcctggttctccatgtcccctgccaggcagggctgttaaactggaaagccggggagggacgtcgctgggacacattgttatctgatcagagctccgaggccccaccaggagctgtgctattgcagaacctcaaacagcagccgctccggccccgccccaggagccacgcagaggcccacgcacggggaggacgccgtggggtggaaactaaagtgcaggtctgaccacaaaaccacacgccacggcaccgctgctgccaaatgccggaggcctgcaggaggcacggattaattttttatgagtctgccttggaacctagacaacagccctctcctctttcagcacaatttcagggcgaatgaccgtcacttccctggactgctaagcgcataaacgcacagggaatttcctagttccacatacgccgttgttcccgcagcccatgcagctgggagagcacacatggttgccgtcgggctgtgtctgttttcccaggagcaagaactctcagaagtgcagtgttgaagcccgagccttccccgtgtcagcttttatgatgaacgaggattcaccatttatttctcccctaaagcaaagcccacgggctctgttttgagcgatggggacagatgctcggtgctgctgggaaggtgttcacggggcagattcgctgtgtcaggagaccaacgtggaatgaggtcggcccagccagtcactgcttaaaaacagtaatgacaatatttgagaaaatgggtggaattttgtggagatttactggcacggggaaggcgtgtggcctctggcaggtctgcgacactgatttctaactacctgttccacagctccactgcctggaaaaactggcaaaaatgtggcctgggtctcctgacaggcctggccattggagtgggggtgtgcagctgagacaggaaatacgaggcgcatgagtgtccccaagcccagatcctcagcctccaaaatcttctattagtaatttcagagctttggcttcttggtgctttgggaaaatttaagatgacgcgtgggctctggcacggccgttgctagtgacctctcctaatagcgcagaagggcctcccaggaggctttcctaggtagagaggggtctgcacgcccactggaacatgctctatcccagcctcagaaaacccacatttggtgcaggtgggacaggaggagtggacacgtcacctggagaccacatgagaagcggccatctgcagcagcaatcaccccgtggggaggcggcgccctggcagctctcatgtggggcctggtccttcctcgctgcctgagcaatgggccctgcttccccgcagacaccgtggtgcccctgggccacacccagcaggtgtccagtgaccgagggtggtgttggccatggcaggtccctgcccgtttctccgaggacctggggctgtgacccagctgggttctcccgggaaggagcggccactgtctgcactgtccagtgctgagggtggcagccatttctgaagcctcccaggtttgtgccctgctgtgtctgaacagctccggagtgcagggtctctgtgtcagtgccggttctaagaggaacgagatgtggtttcagagacactcctcttctctgaggagctgctgggcgggacggctgcttgctttctttgtctgtgacgttggtggctgttccttgcccaggccctgcccaggccagacgtgggagtggcggctgggagcacccatgggcgtgtgcccgtctgggctgggctcgtgtccgtggacctgcctcaagccacacctccctcctccaggcaggacaccgggccttgtctgtggacagaggcgctttgctgggaacagcacagatggcccctgggccctgcggagccgagacgcaccatcatacacacttggagcacatagactgaccaggtctcaccctgcgaggctccctgaggccatgtcctagggaaatagaaggtttcacccggagattggggagtgcagggctgtggcgctgcagggtgcgggccctgaaggaggggcaggggtgctgctggatggtggctcttccaccccaggattcctcgggcccttcacccctgtgtgtctggactgggtatcgctgtagctgtcgggctctggaggtgcacatggctgctgggcgggcagcgctcctgggcctctctcccccgtgatttcggttttgatgtgtttgagccactgaccagcaggcttaggggccattctggagctgggagggcttgtgggggaggcaggatgaacaggggctgcttgccggtcctcaggccaccctgccagctccttgatgtgtctccctgagatcagccagggcatcccggctgtgggtgggctgtgacctgagcccgtcaggccctgctggggtagactggggagaagtgctgagcggaaaccacctcacttctgacaaatgacaagcgctcctgccgcttggtgtcaggcgacgcgactctcagtggcacggatgtctctagaaggttgccgtttctcccttcgtggccgtgggctgtggattctgtgtgcttctggccctggggtcacggggttgcggcgtttcccacttgcctgtttcaggagttgcattctagatgattctctctccatagaaggtcgaggtttctcagcatggattaattgattagatttaattaaatctaaacgtggtgtttccgggcagaatcttcttcagccaaagtgagcgtggccgtctcttctctgggcgcttccaggtgcgttggggcccctgcaccctccacgtcagtgccctggctccgtggccctgtcggtgctctggtgagtctggggttcgtgccgagcgccattgcctccaggtcgaggtgggaagcgcgctggtggggcaaggtggtccctgcatggcacaggttgggagagcagccgggagggcagcgggccgaggcggtgggggagggcaccagttctccacggcaagcacggcctctggggctgctcttccggagagacgtggagacccgcgtgcacgtgtggagactggcacgtgtgaggggcccacaggtgtggccgggcggcctttctcctccccacctctgtccaccctcgccgaggcgtcggtcctgctgagcagcctctgctgccttcgtgcaggtgacagcgcacgtgccattcacgggcgccatgtctccaagaagaggggctcctgccgcgtgcctgttctggggttgccactcaacatccttccagcaccttctctgggcttccggtttgaatgatctttctccaaagtcggcggaaggggctagaaaagtagggacctgggaagaaagcccagacaccttggagccggggtccgggaaacaggccctggcagctcagcgctgcttctctggagtggggatacaatgttggttcacagacgtgcggtggcggcggcgggtggtggcagcagtgtgcggttgttggcgccacgtgctcacgctgggtccctcctggggagcttctgctccggcgggccacgccttgctgtagcctgcaggtcatctggttggtgtctgggggaggtctggggccccagcccggagctcagctctgagcatcaagaaacccgagtttctccccactcccacccagacagctccccactcccacccggacagctccccactcccacccggacagcagcagctgtgtttggaaggggacacaccagagcttcccttgtagcaagtgaggcacgctcagctggagcctggcagtcctgcagctccgcctgcccccttttgaaaaccaaaaatcccaagagacttatgttgaaacagcccttcccggtcaggactgagcctgtggctgagtgcagtttttcagtcgcggctggaaggtccctgtgcggggcggcgagtccctctagatttgctttacagccacaaattcagttttatctgtggatctgaacacgatctatgaatcactaggaaagcaactgtgttcacgggaaggattctcagaattgagctgacactccgtggtgtgaactcagtattgtcagcttgtgcaccgcgcgtatggacacacacctgcacgcactgtcacacacacttgcctcgggcccccacacacaccgccctgagagctaggaagacgaatcggtcagtcacacggattctgcagacagcttccttcaccaggcatggtagtgagggcagcgcccactactcacccagggcctctcgtgcaggaaactgcatggacacgtcgtcctgttcctgtcatgggaaggggcctggagccgtccctcggggggtggggaggagctagtttcccagtcggcgcccgtgcattcaccggtctgagaatccactcagcaggcttgctatgtaacctccgccgttcaggcctcagcatgcagcaagcccgtggggtcccgtctgcccagcctctgcctcggttcctgccgggcacatggacgcttcccttgaatccttctgccgacggcatctgtgggagggcaggtacgatcgatcctggtcctgtccccctagccctgggcgggtgtcccggcacctccaggcacaaggccccttccccaggctgcccagagaccccagccccgaggtgctggtccgcccaccctctctgggaagggctgtgccacatggcgaaagctgctgtgggtcctggtacctggtgtccctgcctgccagggctcatgatgccaacagtgccaggtttgtgggatttgggggtcaggagggcctggccctgctcctgcaaggccgagatctgttcccttggagggttgagggagtgttggctgtagggttcctggaggcctctctcatgcactctgggtctgtcaggaggctggcaactgtggccaaacaggtagaaataaaacctgaaatgagaaaaaaacttttttctagaacttcccagagagcagtgagctggtgccagtgggtcagaggcttgtcacatgtggtgtgtgtgtgtgcgtgtgtgtgtgcacgctctgggggggtgtgcacatttcccagtgtggctgtgcgtgtgtgtgtgcccacgtgtgttcacagaacaccaggctttgccccgactcctggctcaggcctgagtctccagccatggcgtccccgttcctcccgttccttctctgcactgcacactgggaaccaggacaagaggtgtgcggcgtcaggctgtgtccttcccccacccaccccgagcccacgctgctctggagggagaccccagcttcccccgcctaccccgagccctcgctgctctggagggagaccccaggcccctcaggccctttcccgcatctgaaggggccagggcagggcgtccggcagatgaagctgccccttaaagccaggtctgggccggtttacagggaagcactgctcacgtacaacctggcagaccacaccagcgccgcacacacaggcacccctgtgggcacccacgtgcccgaccccgcagaccacaccggcactgcacacacaggcacccccgtgggcacacacgtgcccgaccccacagaccacaccggcgctgcacacacaggcacccccgtggccacacacatgcctgcacacgcacacttctggtgcacacgcccacactcacggaggcttctgcacaccacacagccagcaggtgaggaagtggacgctgcgtggctgtctcttggtggcttcacctggaatgtcaccgtggaccccagagcccgaagccccggcaagcacagaaatcacaccggcagcctgtcccacttcgggcaggtgaggcctggctgagaaaagggggaaggagagggaggatgcgggggtgtgtcctggtcctccacccgtttcgggtttggggtgctcccttcgactactggctccatttttgatgtcttttacttttgtttcgatttttcctggtatcttgagtaaagtctccctggagcatcaaattggatttttcttacaagtaccgtgtgctgttgactcatctgctttggtgtgccgtgggtcacgtgggcctgggctgtgggtaaggtgggcctcgttcctgcaggaacacctggctctgcagcagtggctgccgtatcatcctggccaggcccctgtaccgagggtggagccacggggtctctgatgccttccttctcgtgctttggtggagaatgtggctggacgtcctcccatgacagatgcactctcctgcctggttccctggccccgggcccagccctgagagacgcaccacggccttcacctggaagtgtcacctctggctgctgttgtgggtgatgaggattccagggctgagaagaggaccctagacgctgttcacacagcgtggcaatctctcaaattaatccagcatggggggaatcggggttgaaaccggtttgtgagccggattttctgtccctgtgtacttccttggggcaatttgaaaaatgcagattttactcgtaggccctaaatggataatttccctttaggctgacggctgctcctgtgccctgcctggagagaagcctgactccaggtcgccttggctccgtttctgtgcagcagctcagactatggggtggagggtgagacattcccacccgtgagctgcctctgtccaccccacacctccctcccctgggtgcacgcagctgagttccacgttgaataaatttggcctcaatcatccactacccaccatgtcaccgtgtaagtgctgaggtcagcacaggagctaaaaacaaacattgtaacgtgtaggagactcagtagctcttatacctcggcagtggaataagaataatacattttgtttagttaaggttgaggcagagggaggtcattgttgtgacagggaattttataaataggattctgacaggttctgtactgtgccagaggcagaaagcccatgcagtggggcccgtgacgtatttaaatgacttttcttaaaatgaacttcatgttttaaataatagatgtttacctcccaggtgaaaccttaaatattcccattttcactgaaatggcatgttttttaaaggatacagtcataccccaaattcacagcattccacacaccatcagagaactgccacagggatcctgggggaattttaaattgtagttttaagaccacgtgaccctggagctgccccggtgcccctcccccaccccccgaggtggttttggtcagcgactcatttacatttttttctatgtaaattaaatttttaggtattaaatctcggaaaatggaatactgcgtggcagaatccgcctcttaatctgcttttctttttacatttcccatcataaagatgtttgagtcccacagagagttaaggtatctcgggaagttcattaacttggcaaacggctggagtctctcttccgaggagctgagggctggacaggcaggtcccagcgtcccccgtcctgactgtttgtgtggagacactcatgtattcatatgggaaggggggctctattggaaagggaagggctttttgttctgcagagttacgtggtcttagcagtaatcactttggagtgggctgctggtggccttgggtgcagagactcctgtgggcatctgcgcacatgggggctgtgtcctcatccctgtctgtggcttccccaccgtgttcccacgtgatgccttcgttcagcctctggctttgtgtttcagaccccaaacgccccttcgatgtctcagctgggacctgggtcccggctcagcctcacgcggcgtcccagtccctgcccatcagtctgggcctcacggtcaggccctcagtgacagcagccgtcgcttcactgtggcctcgtccctggagggctctgagttcagccgtcgcttcactgtggcctcctccctggcggggctctgagttcagccaccggtgagattggtttgttctttactgtggtgaccacacggcggctgaggctaagctggagccacggagcaagggccgcctcttcgcctgcccgggcccctctagccccatcttccctctgcccactgacatctgagaatccgccgtcccctggcccgggctcccccgccttctccctcgcctcgctggccctgagtgggcagcaggcatctgcgtggtcaggggcaggcgtcgcattttcctgtggctggaacgtgcctgcaggagcccaggcctggactctgcacgtggtcatcgtgctgcagttgccgtctgtggtcaaagattttaaagttagtttagtgagaaaatcgactccaaacgtgatcagaggggtcgacgcgtcccaggatgagtggttcccggggctgggcgttgccacgggccttgcatggattttgctgatgaatctcagggctctgaggctggcgctcatcgggccccacttgggggatgcagaagggaaggcactctgaacgaggggccctgtgggaggccccactgcgcaaagggtttgactcctgcggcctccctcaaggcctttgtgcttgctttgagaatcaaacgttcctgttccaaaccaaacttgcctcttgcatatggaatcagactatagtgattgtaaatggtagcgttaaagataaaaacaaacagttctaaaaatgactcactgctgaaggcggaaccacgcgtggtgcagagaaggagggtgagagggaacggcaccacactctgtgtttacctctcaagacgctgatgagcaactcatcccacagaacagctggtcctgaacatgtgtgtgccctgccgtgaggcgcacaccttcccagaggcgtgagtggggcccggccactagtgtcctggcggaagcaccggggctgctccatttgtctggagtcctgtcccagtggtgtgggttttgagtctcacccacacggcgccggccgagaagccatgagcggctctgcagggtggtgcggactatagacacctccatgcatggttgccctaggcagtgtctgccgccagcgtctgcctctggacactagctgctcagccaccaggacggcgttgagcgctcccctgcctctgcaggaggagaggggcagggagccatcaggaagggtgctggggcctggggcccgtcgtgctgtgtgtgtgcaaacgcagtgtggcgtcccctgatcaggagtgggagctgcgcgctgcccggttccaggttaatggaacacaggaaggtgggtcatgtcctgcggggcctcatctggatttattggtgaagcgagccttgcacatggctcagcgagggctccgctttcctgcacacgccccctgccagcttcactgtggcctcagaatgggcacacacagcaagtgtggatgcatacgtgcaaggcccgtttcaaagcctaaaactcagtgcccaggtccattgggataacaaggcattttctaatctgatttacaaagacaccagtatgacatggcagagaaataaaaagggggcagggcagggggacacaggcctcgaacccgccgcaggttttctctgcgttccggtgactcccggcggtctgtgctctgggtgctgagcaggtgttttctgttctctcgccagctgcatggctacttggagaatgagccgctgatgctgcagcttttcattgggacggcggacgaccgcctgctgcgcccgcacgccttctaccaggtgcaccgcatcacagggaagaccgtgtccaccaccagccacgaggccatcctctccaacaccaaagtcctggagatcccactcctgccggagaacagcatgcgagccgtgtaagccgcgggggacctccggcctctggcagggggcggtaggagggggcgtgcctccctcccagtcccggggggtctggccagccccccgcacttccaggctgcgtggccaggacacttttggtttaacagccaataagtaaacttcactcttgcttttgacaatggatttgcttctctctagggtttcagccctgtgtatattgccacttaaaatgtcagatatgcagctataaatacctccctctgcatttagcttctaaacaggacccctatttctttccgaatacagcagtgtaatgagaggatggttaaaacgtgagcatcaaaaaattaaagcagtcagcacatctggatcacgttgacctttaggaggttccgacaacacggataggcctgtgctgatgttctgagtctaatttgacactgtaatttgtttaaaagtgaattttttagtaaggtgaggacgaaacatgtaacttccaaataaggccttactcacttaatcctagcttgtgctgggcacgctggccctaacctgtgaaggcagccgaggaggaggactgctggttcccgagagattgatgtggtactgtggggggaaccgaaaacagacacatctgtgggtgaatgagtgcaggttgagctgggacggctggaacgtgcagaccagcaggatggagccaggccggagggcagggacggcgtcctgcgagggtgacccgcaggctgggagcccgtgtgatggggaagctgtgtgtggggtgccccatccaggtggagccccgggggtgggtgcagaggtcctggggctgcaggagtggggaggagtcccgcacggtgagggagagcgtgtaggagatggcggcggggggccacgttggggattttaataagtgattcaaagcctgtaagtcaaaaagggaaagctttctctccacgttgacttttcaagcactgggaggaatgtacgcacctgggaattcattccaaatccctgagtttgcctcgagagctgtaatccaagtttcccgcagacagggcacagtcaggtgcgttccacagccgtagtaaacgtcctggcttcgctggcggctgcgttcaccccaccatgatgtggggcagaaagggtggccgggagacgcccgcagccaggaccgcgctccagccctgtgctggctgccgcctcgtgggtggtcggggagtctgtgtttattctcattctcttaacttactgaaaaatactgctttttagtgcattgagaatgtatacatggaatgttttactggagtctagttttgaatgaaattgttaagaggttatatgaaaccatagaaaaaatgggttttacacacaaaaaatgagggcttttaaatatagtggaaataatagaataatttattctaattatgatttattatatattttatataattataaatatataatatttaacctaataatatataatatataattattgtaaatgataataataaattgagctttttgggaactactccaagataagtgagaacagcaggtgcctctggcccctcccctgggccgctctctgccgctctggtgacatccccgtatacgtggccagcgtgggccctggaggcagccaggacttgggacagctccgactggacccgcttggtcaggggtggagggtggaggctggaggctggaggaaggtgggaaggggaaggtggaagtggcttttctcggggctgcctctgcttgccccctcgcctgcgccaatgtcagattctctcctgcactaggcaagggcctcacgtcgctggcttcaaggtcttgttttccttggggaaggggagagtggccagctgcctggcacgagctcgtggggctgggatgagggccagagggtctggggggccaggcctttacgctcccgcgtcagccattgaaagaaaagctgtgggcttttgttttgggcagcattgactgtgccggaatcctgaaactcagaaactccgacattgaacttcggaaaggagagacggacatcgggaggaagaacacacgggtacggctggtgttccgcgttcacgtcccgcaacccagcggccgcacgctgtccctgcaggtggcctccaaccccatcgaatgctgtaagtggacgtccacgcgcccacaggggaggaaaccgtcccgtcacatgcgcttcactgtctcacccgctctcagcttttcgttcgtgtagacttgggactgaacggttcccaccaaacccaccacagtgtgtggccacgaggggtctgagttgatcatggctgagttattgcctgtggcctcccgggggcccctggcgctggctcctctgatggctgagcatggccagggaaagcggtgtgggccggggcttcccctcacgctgcgctgacctttgcgtatttgtgcgatgactgtgatttgagtgaaattggctgagtcttaggaagatattttgatgacttcttcagaacgaggtggagaccatcaggatgaagtgtgcacggcttctcccctagaagtagtggcatccgcaggggtcggcccgcaggtcgtggcggtgcttgctctgggtgggtcggctcacgtgtgacctgctgggtgccacacgtgtgccccaggccgcccactcaggacaggccctcactgcccctctccttctgatgcagcccagcgctcagctcaggagctgcctctggtggagaagcagagcacggacagctatccggtcgtgggcgggaagaagatggtcctgtctggccacaacttcctgcaggactccaaggtcattttcgtggagaaagccccaggtatgctcttcaccaggggccatctgcggcctgggcttcggcgctggtgggaaccggttcccagtcggtggagcaggacccacctgtgcacggtcaccgggacggggcttatggggtgtggcacggagcagaggctctgcgtggcccgtgtctgcatccggctgtgggtttttgtgtgagccgacagctgtgctgctgaagggaagaggtggatgtttatttctggggccgccggggccactgcactcacatcgctgctgatactcagggagcccacgggctggggacgcagaggagggcaagacgcatttgctggctttgctggggtcctccatctgcagagagtggacgcttcgggggtcagttagcagcagggcaggagggagctcccctccggggccttcccctcccgccagcattcctggggtcggaggcagggatggggtgggtgccgcagacggcgggagctggggtggtctttaatgccacagccgtggtgtgtgtgaggctcttgtgccccaagggcacaggtcacccctgcctccaggtgttgcgctggcccagcctggaggctccggggctgaacttggaagggcagcaggggtgtcctcggagtgatgttcctcctggggccgtcacgcctgtggttctgtgctgcccacgggagactgtcctgcggggattgggctcacagagtggctcccagcccaggtcagttccatgcagacgccgggccccagcactctcatcccagaggggtggcctcgccggctccgagcagagtgtgtgaagacagtgggctgcactgatgggaaactggcattgcagggagagtgggcaccagtgtagctgggcacagggaccctagcccagccctcaagggggttcaggcagagtgggcctggctctccgcaaagcctgccgtgagctccctggttttgggggttcctggtgccttgctgggcctctgcccagggtgcgccaggtgaggggcatgcccccacaaggcctgttttgtgatatttttttccttttgtacacttaccaattggaattcttttgcacttactccaatccctggaaaccgcggaggcattcagccttgataatggggtcttgatttgtacagtttgccggaaacttaagtgcttcaatcaaaatcggctttagaggtctttgactctaacttggcttcctatagaatcagggcttaattggaaaacatgttttaaattacagagaaaaccaactaagggcagtgaccgggaaggcatttgcattgcccgtgccttctcgggaggaggctaattttgaaataattttcccttcagagctttcggtgtgtgtccacgcgttggcggagaaacacttcgcccacagtgtagggcctcgcttgggccaagactggccagaaccgtggctcccagcttctgcttttcaaagcccagacctgagcagcctccttgctttttcttctgcccagagaggcctgggcaccttggcagagcctccccccgaatgcagtccgcagaggtgccccagctcctgccctagccaagttactgtgctgagttggtgccacggcgccatgggtaagggcagccaccagcctgcgagggccaggagccaaggggatgcaggaccagccctggcctcatgcggccgcccctacaggcagcccctcctgccttcatcatcactgtgagctgtggggtcagcaggccggaggggtacctgttctgcccttaagctcggctgccacagccacacttctgggcaatgccagtttgtctgcccatgtcctcctcttgtcccatgaggtcagggtgggtctctgaccctctgccagcaccagccggcgtctggtatacagcaggtgagccataaatgaataggtgctgtgctcgagagcacgtgaagctgtgaatactgcagggatgaagccagaccacgttgataattttattctttatagttgaataagataatttgcatattcatacacacacaagcacattccatgttttcaaaagtggagaacaaatgtccacataattttcttcctccacttccggcttctcaggcgggagccgttgcttacaacacgtgctgatgtgcagtgacaggttggtgcagcagaaagccccacatcctcatcctggcaacgagagaaaccactaaactgaatttaaattaaaaacacagttgccctctcgttttctgatgggatcgtctggtctgtttaaagttctgttttagactgctcttgcagatggaaccagggccgggtgtgagctcaggaggggaggttcctgctgaggaaatccgtcagtagggcagttgaagtggcttctccaggaagggcccctgcgtctctcgactgtcctgctcattccgagggtgcagatggttgtagctgttgggaatgttggctctggacacaggccagggtcggctccaccctgtccttctctggagtacgtaggaagctcattgtccaggccagctcagcctctgcgtatcagccaggccaccttcagctgctatgggttcacagcatctctgagctttgggaagttttagatggagcggctccactgccctggaaggctgggagaagctggtgttggcctcatgaggaagggagtccccgcagcagggctgcattgcggggagccggccgggcaagggcatggctcgccgtagcctgggtgccgggtccctctgggatgctccagcagggcaggaggagggtgggtgtttgagtctcagcctgcgctccacggagcttcctcccaggtgtctcagggcggcgcaaaaggccgggagcggagtcagcctttctctgaggacttagtttacagcttcctcggaaaacgacattttccgatgatgaaaatctgtgaggaatgttcttccaggaggcaggttggctgtggggagccgagggccgggtgttggtttagaagcccctggtagcatcacaagaacccccagtttccaaggctgcaggggttcagctgcaggaagtgggaaccacacccctctcccacccacacccctccccaccttcacacctgcacccctcccgcctgttaaagatcactgtgtctgtgttccgatgtgaggcacctctctgtacacgcgtgaacgttgaagctgctgagggacacactaacgttcaacataaacgaaacgcccgaagaacgcccgcgtgaaacgtgagctcgggctgtgtctagagcctggctgagatgagacagaaggcgcaaggttctgagatgtggatgcatcaaacatgagccagttctcgatgctggagctgaacaacctccttttcttaagtcacgcgtctgttctggtgccgttttttaaaaacatcagcgaagcctgttttggtgtcgctgcgcggaagccacactacgacgccgggggtgaagactcccactccgtttgccagcgatcgcgcagcgggcagggctcagcgggtggggctgcacgggtctcgtcagtggtcgtttctgtggccgccgtgactggcaggccagctggggcctggacggccggcgtctccttctccaggtaatcagggcccctctacgtggcctcccggggcccctctggggaggcagcctggcatctcacaggcggccggggctcccgggaagcagagacgggctgtgccagggctcctaggcccaggcctggacccagtgccgtgccagccaccaccccaggggccctgccctggttcgcagggagacacacagaaatgtgggaggccgggtggcctgcacggtgggagcgagtagacagagcccctcccggaggcccccagcccagcacatccagagccctcccctgagaaaccccagacagccaggttcgccccaaacccaacatggtgggaccccagctcgccccccatctcacggccgccccatcccacggccgccccatcccacggccgccccatcccacggccgccccatcctctggccctggatgttaccacgtggagaagacaggcctgtgggcaggcactagccacactgcaggagacgcaggctaggtttccagatttctccacacagcagcaggcggagggcctgcctcccacctcactgggagggccaggactccaaatctgggccaaatgtatgttgttatttttcaaataaagggaccaaaggcccgggcctttccaaggctgccctgccatgggaccgtgaccggtgtggttcccaggacttccacaagctctgacaggcacctggccgttgttttgggaggctccacccagcagccacagagcttagctggcagctggcaggacacttgcaaggacacggaactgtcacggaaccaccgtggctttgggctgtcacggaaccaccgtggccttggcagctgctggtcctatgccgggacacacacattcaccgcggcgagtgtggggtgcatgtccccaggcagaggccatgtcatccaggtgcaggaagcgccaggcaaggaccctcctgtccgcccagagagccgggtcagaggagtccccaggcctgaagccactccctccgggctcaccttcaggttccttcaaggccagggggaggttcacccaccccagggtgtcgcggaagccccgaggcccctgcaggccccgatttccccagtgaggcatcagtgcccgctggccaccctgcccctctcctcctccagctgcccctgctccttgttttcctagggtctggttctttctcgcgggcggggaggaggtgagggtcagggcccctgtaaggcagactagtggcactgcccctttcggcccttgctgtccctcctctgtcccttgtggaaggtctcggcctggggcagaggagcgggccgaggaggaaggtggagtccaggtgggtggtggggtctgtgttctgttttagtcgtgcgggatgtaggccgagggagatggacccgggggatggctgcctctgtggcatctccgtggtgtgccctctgacggggctgggtgagcaaggaggacacagctgggaattcccagctccagcgtccgcggcacgggcagcctccctgtgtggagcagctcagctgtcacctcctgaagatgttggatgctggccccgaaggcagcatcgcaatgacaacaccttcagaggtgtccatcccaacagtttaaaggccaaatgcagatctttcagatttgtgttttcagggagaaggtgacattgctgggcgcctgtgagtgtggacagacatcactgtcgccgtgtgctccgagagaggagagttggggctgctttgtcaccacatggcgtctttgggagcaggacaggtggccgggctgaacccccaggcttctctgtttgctcccagagaccacacagggaaggcaaggagggcagcgcccggggaagagacacctgcccgtgtcttcctcatgccctgaggatggctcagtggcccagatggtccaggacccctagaattgagtgatgaccccacagttctcatcaagccgcattctggatagcgctaggggcgactctcagactccccctgcctgggccccgctggtgtggggaggccacgcgtcacgtcagtccccactgcaggaggaggggccgggcttctggctcccctccctcctctcccttctcaggccttttgggatcatacacgacaaagtcacccatggtcatgttggctagtttcttttttatatcagctttatcgaaatatgatctatacaccatttaattcactcaaagtgtataattcggtgggttttggtggcttcacataattatgcggccaccaccaatttcagaacattttcttgtccccagaaagaaacccttgcccatgagtggccacccctgctctcccttcccccaccccggctccgacaaccccaatgccccctcgccgtggcctcgcctggtctggctgctccctgctggcctgctggggaaccccatcctgccggctgtggtgcctggcagcttctgtggagcgtggcatcctccatgttccctcgttggtgtgggtcagggcgtagggtcctcaggtcccctcgttggcacaggtcgggacgtggggtctttctgtggctgagggaagcccaccgtgtggctgcccacacctgtctgtcgatggcactaggccacgtccaccctgtggagatgatcgtggaaaagccgccatgaacctcagtgcgtgagtcctgtgtggacgcctgcctgtctcctgagcacatgcctcggtgtgaaagggctgtgggtcacagggtggctccgtgtgaggccctgcaggcagatgtgcagcagggctgggtggctgtttcccctccagaatctcctctgggagccaggctgggacagactcctgggggagagccggggatggatgagacgccccagggacgctcgcttctgggcatgaggatgctgtggggtgcacggcacgaggacgccgcggggagcagggcacgaggatgctttggggagcagggcaggagacgccgtggggagcagggctcgagggcaccgtgggacccagggacgctgctgcttccaccagcggccctcgtggctttctttgtggaaacagtggctcagcatcagcaccggcgtgggggtggcccggctccgggcggcgggtcctggccggtctgggaggctcctgggcccgcaggcctgcctgtgtggaaacctcgcgggtgtggcagggaagcctcccgatgactcagactgcagggaattccctaatgatctggaatatttttactcctgcactcgggcagtttcctactaaggactcggagctctgataaggctgaacacaaaggccctttcaggaccggctgccttccttcctgccaggggctgagttttgaacagcacgggggccggcgctgcccgtccgggcctccacggagctgggagccgccatggcgatgctcttgccggcgggacgcggccctgcgtctcctttcctgagatgcgaggttatttccatctttcagcagtctcggcgctttgtcttgttctggaagcaattgctagatagacatttctggccgtgaatactattgcttttgaaagacaattactttatgatccttaagcagaaacagaaagcctgccctcaccctcaccctggtcgacctgaaacggccacagacgtcggacaccacggggagaggccccacctccaagagggaaggccacaggcgctggctcagccggggtctttgaggaaggcagggatgtttgtcggttccccgcacttttaggggaagtctaagcgtatctgctcccacctgcgcaggaattgcagggtgcgggtgctcccaggtgtgcggtggaggctgctccatggcagctgctgagctgggcctggctggccacgcagacgtggctccccttggggccgctccggcaaggatggttccccacaggcccacgaggcacgggtgggaaaagacgcctccatgccgtcgttccatttgcttttcatggactcaccgctgcggggcagccacctggaggaggccgcgggggagacggctggagtccctcttgcttctcgggacataaagagaggagcaggctgtgttggcctcggctgcaaaaatggcgtcccctcggggtgtcattaaacgcgacatcctggccccgtgtgcgcctcagtgtccctcctgctcagcacagtcactgaacctccctccccttgccagtgccaaaggcctccacagcgtcagggaagttcctagggaagctgaagttgtgactctgagcttcctgggctgggcgggaagcaaactatagcctgttgcgcccgggagcttcagaggaccacagccttttgtggggtgtggacggggcctcaccccaaagatggactttgtcataagaaaagttcaaaagtcattttcaaaaggtgccaaacaaccagaagacttagttacacacagagtgatttggatttttatgaagtgggggtggaggggcttctgagtggtgcatctgggctgggggcttctgggaatcctgtggcatcagcacctgtgctggagtgaaaacgcctctttcttcccagctcctgagctttccagggcctggaggacttgctgcttcatgaaactcagatggcttcaagcgcaactgagtgtactttttagtttcctgtaatttttttcctagaggagagagggatgccaggctctatcgagtgggttcatctggtgggtaatttgcgtggggacctcgggcctcccgggctggcatggccagggcttggctgggcggctctggggtcctgtgtgactcacatttcctctccaccctccacccaggcagcagcccggcactgtaacagagaaaaaggagattttgtctgatttatcagtaattgagggtttgtaacagacacacattttcttctttggagacagagcataaggataaacttaagtgtgtatacctgtaactgttcattttgggaacagactttattttggagaagataaaaggcaggaagagactctgtaggagattgacatctgttaatttgagataattgccccaaactcagcccatctgaggggccaggccgtgcacacacccaggctgtggtggggccgccttgtccgtgtgcgcctggagcccccactctgccaggcctggagcagagagcacaacgcgtcctttcactacacctctgggagcctttttattttttaaaaacatgcaaatggccactggggaaatgccaaaaatacctcgtgttttgcatttctgtctcctgatgggcaagaagttgtcagaggaaggctcttctcatttacccagtggttcctttgcacacaggcagggccagcggccaggccctcatccaccagagtagaccccagcacgagcaggcgtcgcaccctggcgtggagcccccggccccccgtcactactctcacacctcctgcatccctgggaggctgggctgggaactgcagagccgggtcccaggtccacgcacagacgccctgcacacgctctgctgatggggtacctgctccccctcacacctgctctccctggagaggacgagggcatagagaccctcccgtgacctgtcctgaggctgtgagaggccagcagatgcagggccaggacggattcctgaggatgcccctgccctgtagtccctcctacgccgggctggggtcagaacaagccctgagccgcgtgtcctcagcttctccaggctcccagggcaactttggtgtcgagctcggggccctgccagggcacgtggctcctgaggtgctgccctcgacaaagccctgggatgggcctacgtgggtctcctgggacaaggcgccctcctggctcagggccctgggtctggatcacgtgggggtgtctggggagggggctccccaccacacagagtcacagacgtttcctgctcctttcttccagatggccaccatgtctgggagatggaagcgaaaactgaccgggacctgtgcaagccggtgagtgcctttggcgcagctggagctactgtgggtccccagggcttgggaggctggggtctgctggagccactgcgggtccccaggccttgggaggctggggttcctgtttcttagaatgaaacaaataaaaatagtgcatagagtaacagaaccagtaacaaacaggatcaccaagtactcgccaaagcaccatgtgctgtcacccaacgtgtcaggtcacgtcagagccctggcggccggggacggtgctggacaggctgagggccacctcacacaccctggcgctgagacagcccagggaaggtcgtctcacacggaccctcccgccctttgctgtccccttgctgtcaccatcacctggcacagagcaggctcctgggagtcagtgctgtgctgagttcccggggggtggtcagcacctgcccagacccgctcacagcaccgagggcagggctctgcggcatccccagtggggactcctcaccccgtcctccgaggccactgattgcgccgacctcccctgtgatggtgtcccaagcacaagagcctgggcgtggctcctggactcgcgattggccacagcctgttagcgggcggtgcatgtgtgcggggtcgtggcagacgcgtggctgggtcacacttctgctgtcaccgggccgtttccaactcccccagtcacctgccacagcttccctggcaccgcgtgcatacagccggtgcctgaggataatgaccgtcctcggattggagatgaccttttgtgtggatggctgtagctgctcccacatctcctgcacggcaccggttgctgcgtgcatctctcccatccctgcgcttctgatccatgtgctcatgtttaaagtggtttcttggaggcaacgtcttcttgggtggtgtcttggatcctctctgacgctgtcttgtaattggcacatggagaccattgatgtttaggtctttagttttgtttgtttttgtttttttgaaacagagtttcgttcttgttgcccaggctggagtgcagtggcgtgatctcggctcactgcaacctccacctcccgagtagctgggattacaggcatgcaccaccacgcccggctaattttgtaattttagtagagatggggttttgccatgttggccaagcaggtctggaactcccaacctcaggtgatccgcccgcctcggcctcccaaagtgctgggattacaggcatgagccaccgtgcccggcctgatgttcacttattattgatacagttggattgatccctacgttggattttttgagtgttctgtttagtcctataaaagcagtagaaatctctaggccaacataagatgccacatggctcacaagggagttttgaagacatgaacatgcttctgagctcagcagtgtgtgtccctgcgggtcagggaagtcttgtgcacccactcagtgtgtgtccctgcgggtcggggagtcttgtgcacccactcagtgtgtgcagttggaagctggtcccttcagaaacctcagggaagagcccatctcgggcggctggaggcaggtggacaggacaccggggaggagtcttgaggtcgtctcctgttggtgggacgatcggtggcctccatggagagcggtgctggcaccttcactccctgtcccaagaggtggctctgtcagaaagcagcgtcttccaccctgcgacttcagcgcccttcccccaaggacccatccccttcccagaaccttttccaagtggttatcagatggaaaaggttcctccctggccctgggtgaagtgagctcacctgcaccttcagtggtgctcaggcctcccctgaagctcctggcactcacagggttccagttcaatgctgtcgcttttcttgccttcacctgagaagccccttgaggaaagctggaggccccagggcaggccagtgttcagaggaaggagtcccggcctacacggcccgttgtccgcagagccagtgagtcagggtgctcagaagggtcctgggaacggccagccacaggcaaaggcagctggagctgctgtaccggcctctcctccccgcagcctgttcccgtgtccataccggcctctcctccccacagcccgttcccgtgtccataccggcctctcttccccacggccatttcctgtgcccataaggtctgtggctccccgctggccgggcgtttgcaactgcccagggggctggcagccttcgtccatggggtcattgccaggcctccccacctactgggtgtctgattcgttcctccccactgggctgcccttgctctgctgtgcgtctgtgctgggtacactgacatctggctctccgtccctctgcctgcaggcagtgtaccctggtgcctggcctcgtgctgcctaccctccctagccctggctccgtcggggtctccacaggcttcgccagccccgcacatgcacgcgggttgcgggatgcaggatgccggagctgggctgcccagccgctggcctgccctgtccccctaggcagggagagcagccaggaggagccgtgagcctttctgcactgaaaacaatcccagccaagctgacatccacattctctgtgattttctgttttacttttgacactggcatatttcgagggaagcttaacagctgtatgttttaaaagaaacttaagagcacatgtgaaaaattgtgtacttcaagtttactggttgttttttgtttgttttttgtttttttgagacagtctcgctctgtcacccagattggagtgcagtggctcgatctcagctcattgcagcctccgcctcccaggttcaagcgattctcatgcctcagtctcccgagtatctaggactacaggcgccggccactatgcctggctaatgtttttgtattttttttagtagagacgggatttcaccatgttgtccaggctggtcttgaactcctgacctcaggtgatccgcccaccgtggcctcccaaagtgctgggattacaggcgtgagccaccgcgcccggcctgctgtttcatttttaatctcttaaatggagtttgctttaatatatatattttctcatcataaaggaacttcatactcatcgtggacatttggacaatataaaaaaggaaataaaacctagtgtagtctcaccaactgagacataaccactgctggcattgggcatgcgtcctgctccatttgctgctgtgtgtggatgttcacgcagacacacacacacacacagagtacattatattgtggatatatgtgtttgtgtgtgtgtgtgtgtgtgtgtatatgtatgtgtatatatatatatttatttatttatttatttttttttttttgagacagggtcttgctgtgtcatccaggctggagtccagtggcttgatcatggctcactgcagccttgacctcccaggctgaagcagttctcatgcctcagcctcgccagtagctggggacacaagtgtgccctattctgcccagctaatttttaaatttttgtagagatggggcctcgcggtgttgcccaggctggtcctgaactcctgggctcaagcaatcctcccacctgggcctcccaaagtgctgggatgacaggtgtgagccaccgtgcccgcctgtgcatattttgtgaacaaaatgggatgtgctgtgtctacggtttttgtactttctataagtaagtgtatgagcttcatctcaacagtggagtttaaagcaggttgcgtaggtgctggtgccatttggaacccgtattttttccggtacagacgagtttccctctcccttcctgttcttccgtgtttcttctttatcgcttccttctgtgtgtatttaagtggcagtgctcccacggagatagtatttttgtcatataatttgtctatttagagagttgaagtgggttggcctgtgcccacatcaacataggcccttccagtcaggtaggacttaggaaaactggcatgcaccgtccagcatgccccacagggtcccacctccacccatccagcctgcctcacggggtccccgcctccacccagtctggcccacaaggtcccgcctccgcccagccagcctggcccacggaatctccgcctctgcccagccagcctggcccatgtggtccccgcctccacccatccagcctgtcccacagggtccccgcctccaccccagcctgtcccgtggggtccccgcctccccactcctcgctgctgcctgtgagtgcctcccggcccgttactatttcagtctcggcttccatgagacgtttccttcttgtctcttccctcagctgcttctgctctaaagacccacctggtgtagctgctgactccatcgcagctgccctgagcactgctgaattcagaaaacagccttggaggaagcgtctctttatcccccgtacaaatgccgagacaggctccgggtggccagagcttcccgggtcagcccaggagatggcccagacccacagtgctctgggggcagcccaggccccgcccactgacagcactcatggcccctccggcggcagcttcagctcccctggggcagctctgatgcggggcaaaggcaggaagacgcccatgtgccatggcttctgcttcttcccaatgaactgcagttaattaaacaacacagacctgctgccaggagaaagtgtggcccctgggcacagggcccagtggggtggggagcaggggtgcggggagggcatggcccctctgcatgggtgtctgggcctcagctgtttcattatttgtaaatgaaagagcctggacctcaagttgtcttcagttttctgtctttaacactcttaagatttcattgttaatgtgattcaatcaatttggctaagttaggtgctgagctataattaattattttaacaaaagaagtaatacaatggatttttctcctgcttgttaaactaagtcatatgattataaaaatgaaactttatagatgcgactcccgccaaccctctccccagataccaagtgccgccctcggcagggatgcctgcatcaccccagtcatttagggtcatcaggggcccgagtaacgctggggcctgagcacgcggttggggtctccgtgtcccagccccccacccagccccgacctctgcgaacagcgccacacgtcccatggcttgtgtttcatgtgtatacttgaaggagcatgagtttcgtaaacatgctgctggctgttacattaaaaacatgagaaggtaacggcagcctccacacgccgccctctgctgtctgtgcctccgtgcccttggctgttcccaccccggggtctgcgggggtcagggcctgcctcctcttcctcagttggagtgaatttggggtctgactgagggcctcggccatcgtcaaatgtgacaaacacaggccctccccagagaccgcgtctccaggaagcacctgctcctctgggtttcgctgcagtcacctgagcaggtgctgggccaccgagcacttccatcacacagtggctggcggcggagccttgggtcgttttctgaaggtcaccaaccctttggcatcagagcaggcagagccttttgcatccccgccagtccccttgcccaggtggccccgggcaacctccaccctcaggcacccggtcccagttctgtttacagcttctcttttcctggcttctttccccatattgacaagatttcagtcttaggttggtcttgtctgctgtgctgctctgaggaagcctctcggctcctgggtgtgcaagaagccaagggcagccccttccctgtgagcgtgcgtgtccacacgcgtgtgcaggtggcacagagcatccagggctgtcatcagctgcttctggaccgcccaggtggctgcttgggagtttaccgtcacggcagtcctgtgctgccgtggaaacgcggggttgccgtgtggccgccgtggaaacgcggggttgccgtgtggccgccgtggaaacgcggggttgccgtgtggccgccgtggcgcggcagccatcgcctgcccggtgctgattgtgcctcctgtgtgcccttctcctgtagaattctctggtggttgagatcccgccatttcggaatcagaggataaccagccccgttcacgtcagtttctacgtctgcaacgggaagagaaagcgaagccagtaccagcgtttcacctaccttcccgccaacggtaacgccatctttctaaccgtaagccgtgaacatgagcgcgtggggtgctttttctaaagacgcagaaacgacgtcgccgtaaagcagcgtggcgtgttgcacatttaactgtgtgatgtcccgttagtgagaccgagccatcgatgccctgaaaaggaaaggaaaagggaagcttcggatgcattttccttgatccctgttgggggtggggggcgggggttgcatactcagatagtcacggttattttgcttcttgcgaatgtataacagccaaggggaaaacatggctcttctgctccaaaaaactgagggggtcctggtgtgcatttgcaccctaaagctgcttacggtgaaaaggcaaataggtatagctattttgcaggcacctttaggaataaactttgcttttaagcctgtagtcctgatgtggtctttaaggatggtgaatgagctttgtgctgggcggacgtccccgagacacttctccaggggtaacttcatctcctgggaccacgggcatccaggctggggcaccttctcctcaacctgcctgcccctcacccgccgtgggaatggctccttttcactcatacaaaaaaaaaaaaaaatcatcttacctttttaacctttagggtgttttcttaaagaaaataccatccagtttgtttcttcagtccctgaaccagtagaagagaaaggcgtcccccacgccatccccggcttcctttgtgggtacaggccactccccccagctcggagaggacagaattagcagtcatcctgaattttactgtattttgtgggtacaggccactccccacagctcggaggggacagttagcggtcatcctgaattttactgtattttgggtaagcttagctaacatcaataatctttttatattgctttttttctaaaaactgcagagattcctgtcatctgagagggaaattacacactgggcgctaattgcaaaagcagctgcgttctcttagtaaaatcagggtgttttggaaggtttccattttctctgaatgtaaacagcatttgtaatagaccagatcctaaggaagcccttgaatccccacgttcacaccaaactgttgggactccttgtttttatcaggcaagctctggaaaggcctctcaagatgtggaaaatggggttttgctgtaaagtcgctgtaccctaagagtgtctgtgagacagagctgcaggggtgatgtgcagcccccagcccagccctcgcggggaagagcctcacgctctgtgacccccaggattgtggggagggcctcatgctctgggacccccgggattgtggggaagagcctcatgctctgggacccccgggattgtggggaagggcctcacgctctgggacccccaggattgtggggaagagcctcacgctctgggacccccgggattgtggggaagagcctcacgctctgggacccccgggattgtggggaagggcctcacgctctggacccccctggggtttacgtggtctgtgccgcccacacttagtgagtccagcccattcttggaacaaagtacaatatatcttacagaagaaaatattttatctttttctgaaaatataatgattgagtcctaattaaacttcaagcatggttgaccagaaattgaatgttttaaagaaaacctaggccttatagagaaggattgctttccagagcagtgcattaatttttttcttatttgctcagcatgcggcagtccccaccgtgggtttgagcagcactgactttagcacagatcacgtatctcagaggcagaaggggcgtgcggggagcgtgcctgcccttcacaggtgggaggtggcggcccccaggaccgtggccacagcatgaagccggtggggctgagccgctcctgctacctccagtccacaccccacctggcagccggccgtcctgtcctaccagccacactcctgcctcgattggccccggctcccctctcagcattgtgcccagcgtggacatctctcctgcaccccctgcccagtgtctcggctgcaccctccaccccccatctgctccagcatggctcaacgcaggccaggttccccaggctcaccctgggcaccagccttcgcccgttctccctctctttgcctccgtcgtctcttctctcctggacgtagcaccatagtccctgggtgaccatcccaggtccccacaagcacactgaccagccccaccagcccccaggggctccccggctccctgtcaccccacctggtcctgggggctgcgaccgcaacctgcaccagactgtgagcccctcaggcagagcccccaggctgccgcagggcgagatccccagtgttgacgctgggcctacctcgaggccactgtcagtgtggttgttaaataaataatgaatagaaaccagcacccaggtatccgtgttccgtcccgcgtgcccgctgcacttcctgcctctgcaaccccggctgggtctgaggacgccgaggccgctccaggacctgcgtcctccgtgctgtgcatctgtgtcttggggtccagctcagatggcttctgccatgtggtccgagagatagttgccagctctgcttctgccgaccctggaggtggaggcaggacgggtgggtgtgggtggaagacagctgcttagcaagcaccgccctgactcaaagctgctcttggctttttcccttttctacaccgtcatcatggggtcgttagcagtctaggtttccgctgtgccgatgagcttcgggtctgcatgcccgggggtcacggcagtgaggggcggactcctagggttgtgaaatgtgccgttgaaatgcacaaggtgacaacagtgaacccacttacactccagctgtggaattcatttcacgtacatgtttgtaaagtcaagtctcattgtaggttttccttcaaaattgccatccccacaggcagcacagggaggcccctccgagagctccaagcatttggaatccaggtgcccgaggtgtccggtgcttgtggggggcgggctggggacacgccttggccaccagccgcccgcactcctcgtctcagtgccaaaggcatcctccgatgactcggccgaagatgagctcagtccgcagcccctgtcccggccccgcctcccgtcttcagggggcctcacgtctccttttgagtcagaaggtcgcagtggtcggcctccgggaatcaggcatctgagtgcagggggcccccgggctcaggtggggctgacacctctggctgatggtctgtgatggggcccagagggagagttcccttcaccctccctggggcggggggcaggcattaaatggggagaagttcccagcagaatgtatgagccccatgaacggagtgggcatagccctcggggagtcctgccggccgcccctcctgacatcccggggtgctgcccggtgaggaaagtgaaaatgttgtctgcagttagaggctggaacacacatgcccacagagaggcttcctgagcggcttgtctgtcactgtttttgtgtaactgcgcctgaatttaatctcccggaaggcgcgttaggagggctgagggatgatctggtgccaggaaggttggcagttccgagaggttattccagcacgtcagcattaaaggagagaggcgaacctggaacgtgggaaccctgcccaggtctggttagaaaggcggcgtccgcgtggcctggggcttgtgtgaggggtgcacttgtgcccccagatacaagcaggcagggccgggaatctgtctcgtggggggctgcgggcactttggagaaagaaaaccaagttacaaactcaaaattacctaccaaagtcagtatttttttaaacgagaaaataaaacatgacaaatgccaggtctttttgtctgaagtcgttttagtcggttacctggaaacgctcccagggcccctgagctggggacacggagctcttcccccatcagtgcccaggagaagctgctcccggccctaggtccctgtgggaacacacagccagccctgcctctgtgggggtccctttcgtggccagagcccccttcctcaggggacacgcggtccagctgagggtcatcccgtgacaaggagtggctgctgtgatgacccaggcacagaaacagctttgaccacagaacgtgacatccagggtgtgaaggtgtcggaacagatctgcctcgggatctgggggtccttcaccaggggtgggcgtgggccccgagcccagacaggagccagctggagactcaaacgtcacgaagaagggaagacgcgcttccctcccccggtactaaccagcccttctgctggccctgcaacgatgacctaggcttgagaatctgtttctgcctcaaggggtagaaaggggaatagattccattacttccctgtttgcaatggattattaaatccagcaataactgtggcatcggagaggtgttggtacagagggagccggggtcctgtggccttgggtccaccccagcgatcatcacgggagagagctgcttagggtgtgagccgtgggggggcggggggcggctgtgaaactgaggtccccgtgcacagatcccaccacccagggtcgacagctgggggctttctctgctggcacttcccaggcagcagaaccggcccctctaggaagccccctccaggtggcgtggcccaggccctcagtaagctcagctggggctgtgtgagctgaggggctcagagcaccccacaagggatccgcctgattgcagacaagcagttctgggccgccgcccgacctccatgcccttctgctcagcccggcagcctctccttcccaggggtttcccattctgccttttccctggactttccaactcactttgtccaagtccactgcatgtaaagcttgatcctgaaacagtgaagttcttgaggtctctgcagatgctcagcggccccaaatcaccctttcgctgccattggccaaaagcacagcctgggtgggccttgaacacctgtggcctcttcccctccccctcccctcaccccacacacttggagacaccctggggctgggcctgagctcggctctcactgcagagtaaacctgcccacctcagacacccaggcatggctcccgccttccctcatctgatcctgccaccgtggcggctgcctccaagctcctgacaacgtcaggtcagccctggcctcgcggcgctctgggtttcagccttaagagactttccatgtgtcggctgtgggcaccttgacgcaccagggcctggtcacaggttctcaaagcagagattctcctggcacccctcgtgcgccctccaagggcctaaaacgcagacgacccacactccatgccatgtcctgcacaggaaccagggtggcctcccctttctgcagcttgtgggggtcaagccgggacccctacactgatgtttcagcccagctctgccgcagcttagaagtcctacctgatttcagacagagcggatgatgctgacatttccagcccacagcgtggcctgcgccacgctccaggtcgccacaggggtgagaattctgggagcccagctgccgagtgcttctggggttggagctgggctggccccacctgtgaacagcggcctgtgggcccctcatccctgttctactgaaggccccacaaccacctgagggagacagcttttattaaatttcagtttttgtcggttgcctcgctcttcagacggcaagtgagagaagcgtgttctcacgcttactgtcaacgttgcgagggaagcgtgttctcatgctcactgtcaacattgtaaacctgagggaagcgtgttctcagctcattgtcgacgtaaaccccagggaagcgtgttctcacgctcactatcgacgtaaacctgagggaagcgtgttctcgcgctcactgtcgacgtaaacctgagggaagcgtgttctcgcgctcactgtcgacgttgtaaacctgagggaagcgtgttctcacactcactgttgacgttgcaagggaagcgtgttctcgcgctcactgtcgacgttgtaaacctgagggaagcgtgttctcacactcactgtcgacgttgcaagggaagcgtgttctcacactcactgtcgacgttgtgagggaagtgtattctcacgctgtcgacataaacctgagggaagcgtgttctcacgctcactgttgacgtaaacctgagggaagtgtgttctcacactcactgtcaacgttgtaaacctgagggaagcgtgttctcacactcactgtcgacgttgtgagggaagcgtgttctcacgctcactgtcgacattgtaaacctgagggaagcgtgttctcgcgctcactgtcgacgttgcgagggaagcgttttcacactcactgtcgacgtaaacctgagggaagcgtgttctcacgctcgctgtcaacgtaaacctgagggaagcgtgttctcacgctcactgtcgacgttgtaaacctgagggaagcgtgttctcacgctcgctgtcgacgttgtaaacctgagggaagcgtgttctcacgctcgctgtcgacgtaaacctgagggaagcgtgttctcatgctcactgtcgacgtaaacctgagggaagcgtgttctcgcgctcactgtcgacgtaaacctgagggaagcgtgttctcacgctcactgtcgacattgtaaacctgagggaagcgtgttctcgcgctcactgtcgacgttgtaaacctgagggaagcgtgttctcacgctcaccgtcgacgtaaacctgagggaagcgtgttctctcactgtcaactttgcaagggaagcgtgttctcgcgctcactgtcgacgttgtaaacctgagggaagcgtgttctcacactcactgtcgacgttgcaagggaagcgtgttctcacactcactgtcgacattgtgagggaagtgtattctcacgctgtcgacataaacctgagggaagcgtgttctcacgctcactgttgacgtaaacctgagggaagtgtgttctcacactcactgtcaacgttgtaaacctgagggaagcgtgttctcacactcactgtcgacgttgtgagggaagcgtgttctcacgctcactgtcgacattgtaaacctgagggaagcgtgttctcacgctcactgtcgacgttgcgagggaagcgttttcacactgtcgacgtaaacctgagggaagcgtgttctcacgctcgctgtcaacgtaaacctgagggaagcgtgttctcacgctcactgtcgacgttgtaaacctgagggaagcgtgttctcacgctcgctgtcaacgtaaacctgagggaagcgtgttctcacgctcactgtcgacgtaaacctgagggaagcgtgttctcacgctcgctgtcgacgtaaacctgagggaagcgtgttctcacgctcactgtcgacgttgtaaacctgagggaagtgtgttctcacactcactcgacgtgagggaagcgtgttctcacgctcactgtcgacattgtaaacctgagggaagcatgttctcacactcactgtcgacgttgtaaacctgagggaagcgtgttctcacgctcaccgtcgacgttgtaaacctgagggaagtgtgttctcacgctcaccgtcgacgttgtaaacctgagggaagcgtgttctcacgctcactgtcaacgttgtaaacctgagggaagcgtgttctcacgttcactgtcaacgttgtgagggaagggtgttttcacgctcactgtcgacgttgcgagggaagcgtgttctcacgctcaccgtcgacgttgtaaacccgagggaagcgtgttctcacgctcactgtcaacgttgtgagggaagggtgttttcacgctcactgtcgacgttgcgatggaagcgtgttctcatgctcaccgtcgacactgtaaacctgagtgaagtgtgttctcacgctcactgtcgacgttgcgagggaagcgtgttctcatgctcactgtcgacgttgtgagggaagcgtgttctcacgctcactgtcaacgttgtaaacctgagggaaaggaattctctctcacatgctgtggggtgctggccccaccaggcctcccaggagacctccccaaaagtcagaagaagggctccaattgaaagggaggtccgagatgtgctcgccaaaaccacccccagcaagacgccaggcatcctagccacccgacgctcaggccgtgcgtgtcctcagagcgtgttttaaagcaggagggatttggggtggaagattgctcctgcagaaatcagagatgaggggagtaaattagggaaccagcgtcaggatccagacttctgtgaaagagccacagggctcagcatccgacgggcgcacctggggctgggcgagtctggctccagaaggggggtggggccgggagcctgagatgggatgagagggcgggaaggggcttgttgagaaatctaagggccacgggccaccaaaaacaaaccaggaggtgtgagtcagtggggaggctgggtgccaggaagcctgcgctctgggacatgcgtggggcaagaggggcgccctgagcttggcgacgccagccgcgcgcctgggagggatccgcctgtccacgtgcagccgcctccgggcggcgtcggccatgctgctgccccaccgtggctctgtggctccagccggaatggcaaagcctggctccacagctgcctgggagcgtgagtcacgcgccccacagaacacggcgggcagcgcgggcgaggattggcgaaagccgaccgatgtgttttggcttgtgtggtctgtgggagcgtcctttgtcatcagcctaattgggcaacagatcccacctcactgtgccctggagcagcacggggccaccacacagcctgaggccccacttgcgcttcccctcgctgccgtgctgtcctggccccgtcgctgccacctgagacccccatcaagtacctgagctctgcgtctgttttcacgcttctgtatgtgtaggaagccccccaccgatgttgctcggggtcgacgtgataaacctgagggaaagggaattctctcaccccgaccgacacacaggatgggtgtgggggcaaagtgagatcatgaacaaaagcatctgggcccgtcctggacacatggccagggttagccacggttgtcagcctccacggagctgcagtttcagcctggaggtctgtggcgtgcatggttggaatactcaccagactcacgtggtcgtgactccggaagatcatgccttcctggaaaccttggaacgcgcttcagcagaaactccagtgaagagtcggtgagagagcacaaattcccaaaggcggatggagttcggaaggacccttctctgtctcccacatcaggcggtgcctggttggtgcagatttaccccatggtgggccgtggatccctcacctgctctggaaactgatcttggctctgaacaaggagaaatgatgcctctcagcctcgagggatgggtgataaggcagcttcatccgctgttttctttcattgtttgagaaaagtcatgccccggaggtgtcattcctggttgtttatgttgatggcaaaacttggactttcttgtcatacagcaaacagaagacaatctgatctttgttttccaggggtttagactttgaacaaaacctcttttgtccagtactgtagtgcatccctggtagagtaattcaagctgaacacaaggttgcataaaaatgtgggcatgggggagcagggaactgtcttgggatcattctttgctgtgcacagcagctgcagcctgcaggcagctcagcgttagatctccccacccccaatgccacctggggaccagatgttactgttggcggaagaagggggtccggggcactgtctcagtctttggggcttccatggtggagcactaccggccgtactgttggtggaagaagggagtccggggcactgtctcagtcttcggggcttccatagtggagcaccaccggccgtactgttggcagaagaagggggtccggggcactgtctcagtctttggggcttccatagtggagcaccaccggctgggcaccttgtaaacaacagacattgatttctcacagctctgggggctggaagtccgaggttgggactggtacggtcgggttctggtgaggaccattccaagttgcagacagccaaaatcctgccatatcctcacatggcaggacaggcgatttgtctctccctccctgtgggacggcagtcccgttggatcagggccccaccctgatgacattgtttaacccccagttacctcctgcaaacaccactctcaagtagagtcacgcggacgggggttagggcttcaacatgaggttgaggggacacgagtccgtccatagcagtgaccccacttgtctaaagccacagggctgagcctgccccctgcccccctgcctgcccatccccaggcccccgttcttgcccccaggcccccccccgcccacccccaggtgctccctgtgctgcagacagagcccccgaggagccaggagctgccgggcaccaaccacacaggaagccaacaggtggggcaggcttgtgcctgccaccgtgttgctcatgccgatttttattctcagatcttgtcacctctgtcttgtagcagaagggggccctgatctgggagccgtgaagaccccagctgtcccccgggagccaggccacaccaaggcagccaaggggactacgttgggaggaggatgtggtccgggccattaagagctgtgatgagcccccaggtctgccctgggtgaggggctctgcctgccctggggctgcatagacccggctggggctttagaacaggaaccgttcgaggggctgcggtgggtgaagcccactcatgtcctggctcctgttaccgggtagggatggcagcccattttccaggcttgggggttctttaagaggccaggattgtgccgaatgctctttggctgacgatggccgtggcgggggctttgggaggggaggtcctggaggagaggcttgcccagctcactgcctgcgtctgtggccagaattggcacctgcatggggcctggaaacgtcgtgctcacctggggcggaagcccccctccaggactcagctcccaacgtcactgctaccgaggcagagactctgcagcggcatcagagagaagctgggccccagaacagcaccaggcatgggacgggccctccgtgccttccacggaggatgcaagcgtgaggcctgggtctgcggggacggtttacctgtcagctctgcacgccgctgaccactgcgcgccgcctccacagacagtccccatggacgctggggctgccgtggacgatggggcagccatcatggacaacgggactgccatggacaccgcagccagcctgctctgtgggaatatgctttgtaaagccagccggccctgaggccagcactcgccttccacactctgctctttgtaacgagtttcataaactcaccctcaggtgattggtgtttctgttgcaccgttgcttagcctgaaaatgagctgccctttttctgagcccatcctttcgccacctctaccccagcccctcatggctgatatcaggaggtagccagaggccgcctggtgcagggtgagcccggaacacgggcaacagcttgaactgggcctgtgcggccccctccacgggcgacagcgtgaactgggcctgtgcggcccccctccacgggtgagactcccaggcgctcttgcagacgctcactcactttctcactgataggatgcgtcttacgaggctctgatttacagagcaggcatccatcttctctgaaacccacacaaaaagcacagtttaggccaagcccaggtgcagtatgttcgtgtgtttaagcttcttagatgctggggtgtggaagcagccgtgtggctttcctttgcttgtgaaggtgagtttgcactttccagcttctctctgtattgggaaggctgcagctctccaggacatgacttagcagagaacatcccgctgcatcctcataggccagcgggtcaggcggggccattctgaaacgtcccctgtgggtgccgggtgcctcgcgcatccctgccgtccaccgccctttgtccctggctgtgcttcgcggcagtgccccttagggcaaggacagggagatggggcagtcgcctggggaaggcccggtcccggtgggaggcagcctcagagcagctgggatggcacaagacgccgctgccagggctgagaaaccatccggccaaccccagacttgagccagacttcatgggcaaggctgggagaagccgcgtggagaccccagcccagggaggggcactgtggcaggaacagggcccgcacctgcagggtcagcccaggccaccttccaagcacggtgaccacgtcgcagctcatgctgccagctccgggccaagggacctggactggctctccagactcacaagatgccgtcgtgggtggggcacgtgcggtgatcccaggtttcaagtagctgcccccagctccctgcaaatagctctgggcggaagagaagcagtgggcaggcacacgagtttattcctgagaggagcgtgttgccacagcctctgtggactggagccccaggcttcagaaagagagggagcgcctgcctgtgggtggggggacaggagctgccaacctggcggggtcccagcgaagcgtccactgggccttctgcttgcccctgggggtggtggatgcatcagtgctgggcctgctccgaacccgcagggcaagcagcccgtgcgtcccgatgccactgccggccgccagcatcctggggaggtgggtcgcgtgtcccagagccctgtgcccctcgccaccaccatcctaggtcaggacttccccaggaagaatccaagtggctggagagatgcgggggttaatgccggtaccaccgcggttttaaacggggccgtgtctgagccgtgttcttgacgttctccagccagcagcagcagacgccacccggttgccccagccccagcggctctcgggcatagccggccttggcccgtggggcggctgatttacaggacagctgtgcacggggcctctagtgtccgccagagctggtgggtgagagtttttaaagcgctcgggacacttcacagaagaggcgcactggcccccatgcctggccatgtttctgggccctggctgaaaatcccgagcagcggagagaggatcccaacagggtattaatttaaccttccagccatgtgcttttgcttaagatctaaactctgaaaattaccagcctaatttagaatggaggcttggccattcgggacaccagcatcttctgagcgggagagatgtgggtgcccaccggcgtctcactcccacatctgggcctgtttccagtgacccctgcacctctcaaaggcgcaggcctgagttcacagagagcacttggccaagccctgcctctggggctccccatcgtctggctttgtcgtggactcatcatttctggatttaccacatgcttcaagctggaacagcaggaaggggcagttcctgaggcccagctgcgtccgcagagctgggggcgccatggcctaaggcaagacgcgtgccctggatgaaaatgactccagctctgtagtctccagacagcggttagagccccaccctccacggacaccgcctcctgccaccccttcaaaaaagtgttgcagcccagggcccagatattcaattttctaatgtaaaacgaggcgggtagggtttcccaatcaacatgagggcgccgtgtcctctgcagccccctgacttgcacaggcagtcctggggctctgccccatctgtgaaccctcagctgaagagggcagccccagaggcagccacattcaggtggctgaaggcagagtcctcctcccaggaaccgcctcggcgctgccaaggcctgtgcaccttcttcagcccgaactaaggagaatgtgcgggactgagagccatagaccctcgtgagccaggcttgagcgttgtcttcagatggggcccagtgggcctcactgttgtgacgactgaatgtgacgtctggggtgtaattccagcgtgacctggtcctggggtgtcactccagcgtgacctggttcctgaggtgtaattccagcgtgacctggttcctggggtataattccagcgcgaccttgttcctggggtgtcattccagcgtgacctggtcctggggtgtcattccagtgtgacgtggtcctggggtgtcactccagcatgacctggttcctggggtgtcattccagcgtgacctggtcctggggtgtcattccagtgtgacctggttcctggggtgtcattccagcgtgagctgtttcctggggtgtcattccagcatgacctggttcctgaggtgtaattccagcgtgacctggtcctggggtgtcactccagcatgacctcgttcctggggtgtaattccagcgtgacctggtcctggggtgtaattccagcatgacctggttcctggggtgtaattccagcgtgacctgctcctgaggtgtcactccagcgtgacctcgttcctggggtgtaattccagtgtgacctggttcctggggtgtaattccagcgtgacctggttcctggggtgtcattccagcgtgacctggtcctggggtgtcattccagtgtgacgtggtcctggggtgtcactccagcatgacctggttcctggggtgtcattccagcgtgacctggtcctggggtgtcattccagcgtgacctggttcctggggtgtcattccagcatgagctgtttcctggggtgtcattccagcgtgacctggtcctggggtgtcactccagcgtgacctggttcctgaggtgtaattccagcgtgacctggtcctggggtgtcattccagcatgacctggttcctggggtgtaattccagcgtgacctcgttcctggggtgtaattccagcgtgacctggtcctggggtgtaattccagcatgacctggttcctggggtgtaattccagcgtgacctgctcctgaggtgtcactccagcgtgacctcgttcctggggtgtaattccagcgtgacctggtcctggggtgtcacttcagcgtgacctggtccgggggtgtaattccagcgtgacctggtcctggggtgtaattccagcgtgacctggttcctggggtctcattccagcgtgacctggtcctggggtgtcactccagcgtgacctcgttcctggggtgtaattccagcgtgacctggttcctggggtgtaattctagcgtgacctggtcctggggtgtcactccagtgtgacctggttcctgggtaattccagcgtgacctggtcctggggtgtcactccagcgtgacctggtactggggtgtaattccagcgtgacctggttcctggggtgtaattccagcgtgacctggttcctggggtgtaattccagcgtgacctggttcctggggtgtaattccagcgtgacctggttcctggggtgtaattccagcgtgacctggtcctggggtgtcactccagcgtgacctggtcctggggcgtcactccagcgtgacctggtcctggggtgtcattccggcgtgacctggttcctggggtgtcattccggcatgacctggttcctggggtgtcattccggcgtgacctggttcctggggtgtcattccggcatgacctggttcgtggggtgtcattccggcgtgacctggtcctggggtgtaagtccagcgtgacctggttcctggggtgtcactccggcgtgacctggttcctggggtgtcactccggcgtgacctggtcctggggtgtcactccggcgtgacctggtcctggggtgtcactccggcgtgacctggttcctggggcgtcactccggcgtgacctcgttcctggggcgtcactctggcgtgacctggtcctggggtgtaattccagcgtgaccttgtcctggggtgtcactccagcgtgaccttgttcctggggtgtaattccagcgtgacctggtcctggggtgtcactccagcgtgacctcgttcctgaggtgtcactccagtgtgacctcgttcctgaggtgtcactccagcgtgacctggtcctggggtgtcattccagcgtgacgtggttcctggggtgtcactccagcgtgacgtggttcctggggtgtcactccagcgtgacctggttcctggggtgtcactccagcgtgacctggttcctggggtgtcactccagggtgacctggtcctgaggtgtcactccagcgtgacctggtcctggggtgtcactccaacgtgacctggttcctggggtgtcattccagggtgacctggtcctggggtgtcattccagtgtgacctcggcggcacttgcagggtggggtggctgacgaggcggggggagcacacccgttctccctcccctgccctgggcaccactgcagaggcagcccctggcctcatcctccaagcttcacagcttgggctgcactccccgagttcactgtggctggacttgccccaggccaaaggctgggaatgcctgggctgcagagccccaggaaggcctggcacgaccctcagcagagtgtggctttatgggccctggtcagtgagctgcaggctgcgtcctgggaaggccttggaatcacaatggccccgtgattttcttcctgcctcctggacgtccccacctcctggtcacccaccccctctaaaaccttagcctccctactctgtgtagggcggacgctttaaacctcgatgtttctactcagtgtgcagggcggacgctttaaacctcgatctccccactcagtgtgcagggcggacgctttaaacctcgatctttctactcagagggtggatgatagaaagatttgaatgagtgaatgaaagtagagacttgaaaagtcagcacaaaagcaacaaaatgcagcaactccactcggaatccctgggtggaaagctctggttgacttcctgcggactcaggctggtgagatcctacagctgggaacggcccatatgggtcagtccctgtgatgcctccagtgtggcgggaaggtggcttggccaccatggatgactcgcgcctgccttcacgaccgccgggacctgtgcggggggggaagagggcggctgcaggggaggccgcacgtggcacaggtgctccggcgtctcgagctgcaggaaaacgccgtctccatcgttcgcagctgctggtggactcctcggcacccagccgtggcggggaacagctgcatggactcacgggctcaagcccggggctaaatattttctctcgaattgtggaaatgcttttgtttactgcaggaggctgccaggctctctgtggtggcgactgtttgcaccgggagcctgtgtactggctttgggggccacacataggcccccaggtggtgacaggaggggagtttccctccctgtggccgaccctgctgccaaaaacccaccagtgtgcagcccacggggaggagaaaacaggctgaggagactcactcacagcttgctgtctgcgtagcattcgctcagagtggcaccacgcgtctgttaggaatgtatgtgcgccattgtgagagctttagagccactgagccgtctgatgtctcctctaagtagcacgagaggcctgagaccaacaggaaaacagcaaccgcaggaatgccggctgggatccgcctcgccgctcctgctgactgcacaccctgcctgtttgcttcccaacacccccacagaagccggcacaaaggctggggtgggcgtgggctgggagccggtgtcggctctggcccgggcctggcggagcagccttggggacccagcacccgccctgtgggctcttccccaaagccccggacttttagggagggctgggtgggagaaagctctagaaactcgggagccccctgttccatccaaggctgcccggtcacagcctccacacagcctgtccctttagaaggggactcaggagcaccgtggaggcagtccagcctccatgacagtgtttttctttcgcagtgacggacggcttctctcctggagcagtcgttcacctttgcagttggatttttactgactcctgaaagccgtcttgttctgtgttcgagtttaccaaatgtgcagacatttatcaaaccgagtgtcgggagcagaaatgcagtcgtgcatccacgttgaaactttcgctttgattcctgcaaacccacaggcccctgggtccaggactcccactgcagtttgcaagtggacttttatagcacgttagtgctgcaggaggttccaaggaaaacagtcctcgccagtattagaaccagctgctactctctcggccgatgactcacgccttttttttttaatggggtgggagaaccaggcaggagacagagggacccagtcagggccctgttggttttgcggagggtgccccagccacaagcctgcctgatcacactcattcgcaacttgtgtttatttaattttttttttccttctcacagttccaattataaaaacagaacccactgatgattatgagcctgctccaacctgtggaccggtgagccaggggttaagtcctctcccaagaccatactacagccagcagctcgcgatgccacccgaccccagctcctgcctcgtggccggcttcccgccctgtccgcagagaagcaccctgatgccagcggcccctggcgtgagccccaagctccacgacctttctcccgctgcctacaccaagggcgttgccagcccgggccactgtcacctcggactcccgcagccggccggagaggcccccgccgtccaggacgtgcccaggccagtggccacgcaccccggctcgcccgggcagccacccccggccctgctgccacagcaggtgagtgcgcctccaagcagtagctgcccccctggtctcgaacactcgctctgccccagcagcccctctcctccactcccgcctgccacccaagagccgacctgcctgcagccctgcagcccagcgtgcccgcccgccacgggccgcccgcagcacctgccgtccacggtccgcagggacgagtctccgactgccgggccacggctgctgccagaggtgcatgaggacggtagtcctaatttggcccctattcctgtaacggtcaagcgagagcctgaagagttggaccagttgtacctggatgacggtgagtgcccgcagccatgcaggtgtgtgccccgcctggcgccatggcgtgagctcatggaggggccgtgtgcgtgctgcgtgtgtggcacgtgtggaagtgcaccgaggcaccgggcagggtgtggggtgcgtcctcctgatataaagtgcccgtgcggtgccacggcgtcagcgccacctggggcgctcgccgtgagatctgctccggtggtcgcagtgtggggcccttggcgggtcctgggctgcagatcctcctgcgagacctgtcccggggtctaaggctcacattggtgtccaggtttgcttctgcagctgaatatggagccgcacggctcaggctcaaagccctgacttggagagggaccggcctctgcagtcggggcatcgtgggtgccgcctgagtcccgtgaatggtttgtagacaacagcttagccgaggtgacgagcacgttaccccgtgcggctctgtaaacacatctaaatgcagtggcggccttgccaggagctcgcagggtggccgtgacaccgggggccctagactgtgccttcaggccccaggtgcagggtcttccccatctagcccctgggctcgcacagcgcggagatgcacccaacaccgcacacctggggttgttagggaaggaagtggcctcacgtctgtagccaggcgggtggtgtggggcgtctgagcactcaggcctttctgtgacgagtggtgaccgaaggcgccgtggcgttcttctcgactgtttacactttaaggcgcagcccgacttgcttgcagtcgcgctgtgatcggggcgtgcccgtggccctggtgaccacgcgttagagggtgattccgctcgtgttttctggccctgcggtttgtgtgcgcgttgtgatcggggcgtgcccgcggccctggtgaccacgcgttagagggcgattccgctcgtgttttctgctcgaatggtttgtgtgggaattggcttcatttcctcggaggcacagtgagtcctcccaagtgtatgacgtttcccaggcccgggttccagcagacacacctggagccactgcccactccctgctcagtggcctggggtccaggcgagcctcggccttctggggagggggcggcattagcccctcctgacccagggggggcagggactcccgggcgtcaggagctcagtttcccatctgctgggaagggagtgaggccaaacgccttcctgctgtttcctgactgaaggctacaagctttttaaggaggatgcatgcaaatattttagcccccaaaatattaagctcttgagcccacagccctggtgtgtgtgtgtttgcggtagtgtgtcccatggagcccgcagccctggttgtgtgtgtgtgtgtgtgtgtgtgtgtgtgtgtgtgtgaacttgaggtagtgtgtcccatgaagcccgcagccctcatcgtctgtttttgcaggagtgtgtcccgtcagcccaggaggctgctgcctccccagggctgtccctcagagccacacactggaggcccgtggctgccccctggccactctctggaggttcatgatgactgtggggcggggccaggacagtgttccgtgtcctgtgcagatgtcgtcctgaagttcttactgtctgacctgcctgctgtcctccttgtccacccgcgaggccagccggagctccgcatggggcccatgtccctgctctgcagcctcctgagcacagatggactctgccttcctccccagcccctgcgcgaggtggacgctgacatccatgcctccagtccctcacccctgctttgtctcacgcggtaccaggtggtcccaaggcggctgggagatgctgagaaattctctttccacctgccatgccttgtcccagttgtgacccaccagctctgggctcccacaattgggtagtgccctgcaggcccaggtgggaagcaggtcccggtcatgtttctgctgccctgtggcccacgtgtggctttatggcgagggtagagttcggggtgggacttggggtgggtgagcagcggcagtgctgggggctgggacgtgttctgcgtcaacacagcaggcaggggactgttgacccgcacggtgctcaggtgagatcatccctttacccagcccgttactgccaaagcctcaccaggtggcccgggcccctctggccttggtcctagaggtcaaagctaagtgagccaggccttgccttggggcctggtgggccacagagggtgggctgttgtgtcgctgagtgcacaggctagggatgttggagctgcatgggtgtgggtgtgaccccgccctggcctgcctgactgtgcgtggacatggaggggatgggtcttggggaggggagtgcacagacgactccctgacacatggaagggctgaggccagagtgcatctgccatggggctgggcctggcctgcagctcctctgaggatgcccaatgccacgttcccattggggcctctcctgacagccagtgggaccctggagcccaggattcgccagctgtaaagcagtcgctcacaccccttttaagaaagtttgtttcccggcgtgctgccgtcgggacacttgaggacaacctctccccgcagagtgagctcagttcccagcgggcctctctccccattttcctcactcagttgccgtggtgatcctccccaaactcggatcgaatgggtcacgtcctgttcaaaagacccaggggtttctgtgttgtcagagcagaccacaccccagcccaccaaccacagtcatctcgtccacgtacgcttcgtcaggcccagggccggtcctgggaccttgagcacagaccccgagcgccagccctgcacactgttctggtcacagtttatgggtcctgtgtgcttctgcctccataacctgggagcagccacacacaagctttcggggttagcgtacggcgctaggcggtgccgcttcgggggtcggggttgggatggaggttgagatacctgtgcagacacctccctatgacatggcaagtgtgtgcaggtaatgtggtgatgtccgtttcatctccacctgtgaggtccctcgatgctcagccaggaccacagcagttagggcttcaggcagctggaagcagtgtcagctgtggcctgatctcccccccgcccccgcccccccgtgggcagacagcccctctcggtccttcacaggcaggcaggcggggcgcatggcagaggaagttctgctcgtggtgtgtgtgaaggggaggggagagtcctgggggctgaggtggtgcaggtggggtagtgtctggtgcaggcccggctctgggttagggtggggtggtccctggtgcaggccccgctctgggttaggacagggtggtccctggtgcaggctcaggctctcggtcatggtggggtggtctctggtgcaggcccaggctctgggtcaggatgggggtgttccctggtgcaggcccggctctgggttagggcagggtggtccctggtgcaggctcaggctctcagtcatggtggggtagtccctgatacaggcctgacattgccgccaccctgggagacaggcaccaggccatggactccaggttcctcctgagcacctgggggcaggtccacccactctagacacctgttcctccctgtgagaaaagcagattcaaatgtttattgctctgtcggagccgagtggatggagccttcactgagaatgacacgggccgagccgtttcccgcgtcctgggtggatggagccgtagatgggtcgctgcctgtccttgtgagaagatggctggagcatccaccaacatggccgggaagggtcccgggtcagggttgagtctgggtcggcccctcccctgcagatgacctctggcttgccctgggtccctggaacctggaacccacaccccaggctcacaaacgccgtgacataaacgaggtcagggcctgggttatgtcgggaaagcctcacgcaggctgaagacctgaattgtaaggtggaactctgagtccccgagactccagctccatggaaatgcgggggtgtacctggggaccgtctcgatggggacagcgggagagggagcccagaccccaacaagctccatggaaatgcgaggagccatcttgatggggacagcgggagagggaaggcaggctagggtgaatgtgggtagtccttgtttagtattaatatatattttgtctaatttcacaacccctaagagaatcgggcacctcagcagccaccctggggctcagtcgctggcttagaaagcaggcaagcgtgacctggagttcgggggcggagaagaataggaagcacagggcgccccaacaagggacgatcccagcacctggagaaggagcagagacgagagacagaaacaacacgaaccccaggtcaagtcggtgccgtgcgtgccaagtgtcctcagcgggtggaaagtgtcgctgtgtctttgatagtttacacaacagggagagagcgaaaagctggggttggaggaaacaggagagaagtaaggctgtgtggcggggacaagactcagacacacccctgactatctgtaaatgggccgatcggacacaaggccagggacctcctggccagccccgagccccgtgaggtgcctgtggcaggacgtgggtatggcaggtgacagaagccctgccgggtccactttccagcctccccggcttcccttctgcgttccgctggcctggccgccacctccagggacaacaagcctggcatggggtgcagatttagtctccagccctctgcgaaccaagcagtggtggatcgcagagctgcgtgcggggagagggggagacaggccagcgtctgggatgtcctcgtggggccggggactcagccccggcccctgggcacccagccatgtttgagaggcttccctccgcctgaccagaatcagagctgtgggtccatgaattgagtcacttcaaggtcttgctgcttcacatgaacagctgtgcagaggcagccagagacagcccggggctcctcacgcccagtgatgctgacgacggcctgcccgtgaggacatagaactttttctgtgcgtagtggtttttcatttgttttgattttgttttccaggaatgtggagttaaaaggcaataagagaatagtgtccagttgcagagtctaggtagggggtccacagtgtccgtgtttgcatccctgaggggtctgaggagggcagttcacgctggagcctcctctgtggcagcctctgctcagccgcaggaacctaaaggtcacgcacagcccacatcctgtgcgtctcaaagaagtcaagcctcaaaatgaaaaatgaggctgggcacggtggctcactttgggaggcctaggtgggtggatcacctgaggtcaggagttcaagaccagcctggtcaacatggtagaaccccatctctactaaaaatacaaaaattagctgggcgtggggctgggtgcagtggctcaggcctgtaatccctgtactttggaaggctgaggcgggtggatcacgaggccagaagatcgaaaccatcctgactaacatggtgaaaccccatctctactaaaaatacaaaaaattagccgggagtggtggcgggcgcctgtagtcccagccactcgggaggctgagacaggagaatggcgtgaacctgggaggcggagcttgcagagagctgagatcgcgccactgcactccagcctgggtgacagagcgagactccatctcaaaaaaaaaaaaaagattagctgggcgtggtggtgcatgcctataatcccagctacttggaaggctgaggcaggagaatcactcgaacctgggagatggaggttgcagtgagctgagacctcgccactgcactccagcctgggtgacaaagcgagactccatctcaaaaaaaaaaaagaaaaatgaatccagctttttttttttttttttttttttttaggatttctttgctttccagtcctttctactcccaagttttgtttcagaagtgcttgacccataaataaattccaacaatgaggtcgtctttgtttctcctgaatattgggctttcccctcagacttctcgagcatggccgagccacagaggttcagtttttaaacagtggttttctgtatcttgcattattttaaatgtagatttgaaaaaatgccacagagctccgtgtggctccttttctaatgtgatctccacgcattccgcatcgtggagaagggccgtgaggaggctccgctgggggcggactcgcggtggattacgcgtcagcgagggccgccccgtgccacgcgctcgcgcgctgagagcgtttgtggggcctgtgtcttccgaaacggaggcgctcggggcccgctgcggtgcccgcgggtctgtgccgctgaagtgggcacccctcctccagcctcgtgaggacagcggccgtccctcggcgcggggctggtctgccacgggcgcctccccgtgtcccctgggccgccgcacggcctctgccacggtcggccctttcagtccctcagaagcacttgggtttaaagtctccatgtcattaaaacaacgagcaggtagacgaggcggccggagcgtgtccgccgcagtctgggctgtgaacgggcccctcgcccgcccctcctgagccggagctgctccggaggacgagaagctcccttcgtggaaagtcttactaacctggcccggcgcccaggtctgaggccttccccccggctgaggatgattgaaagagcctgtgtgccgccatccaacgtcgttaccgtcgcagacggcggctaccgcgtgatggatggagcagcggactcagccgtgcaaatcattcatcggggtcagtgcctggtgccgtgggaccgcggcgtgggggtttcaaggcgtaaaaatcgcaccgcacgccacccggagacggagcctgctgtcggcagggcgggccgggctgcggggccgggtgctccggaggccgctgaagaggcagctccccaacgccaagagcccgtccagccccaggcccggagctgcttcctcagggagcccaccctgtgacgtgcccgaggtgaggcggccaccagaggccgcgtccaaacctgtgcgccaggcagcgtgtggctgaggctcagacgtcgactcacgcgtttcagttcctctcgagaaaactcgctgccacctggtctcagccagcgaccgcgagggacagtgagaaaggcgagagcgggcacacgccccccatcaacctggtgtggccgggggaaggcgagagcgggcacacgccccccatgaacctggtaccgccgggggaaggcgagagcgggcacacgccccccatgaacctggtacggccgggggaaggcgagagcgggcacacgccccccatcgacctggtaccgccgggggaaggcgagagcgggcacacgccccccatcgacctggtaccgccgggggaaggcgagagcgggcacacgccccccatcgacctggtaccgccgggggaaggcgagagcgggcacacgccccccatgaacctggtgcggccgggggaaggcgagagcgggcacacgccccccatgaacctggtaccgccgggggaaggcgagagcgggcacacgccccccatcgacctggtaccgccgggggaaggcgagagcgggcacacgccccccatcgacctggtaccgccgggggaaggcgagagcgggcacacgccccccatgaacctggtaccgccgggggaaggcgagagcgggcacacgccccccatcgacctggtaccgccgggggaaggcgagagcgggcacatgccccccatcgacctggtaccgccgggggaaggcgagagcgggcacacgccccccatgaacctggtgcggccgggggaaggcgagagcgggcacacgccccccatgaacctggtaccgccgggggaaagcgagagcgggcacacgccccccatcaacctggtacggccgggggaaggcgagagcgggcacacgccccccatcaacctggtgcggccgggtgagcatggagcccatggctggagaaccctggggcagctgcagtggcaagtctgccccttgaggaaatgggggcaaggatggcactgagacgggtgctgaacaaggctctctaaaaataggggctgcatgggctgtgcacatcccgtgtgggtgctgttgcaggtctcccgccgtggcgtgcaggctgtgaggccacagtgcctccgtccttccctgaggtgggcacgggagaaaggagaggtgcccgctcctgtgagctgcccacgggctgctccttggggcctgtgaggttctgggcacttttttaaattgcctgaagatattcactgtggacacagaatattttgaattctatgctgtttctagttgaaatatcagtctacagtccaattttgtgtacttggaagggaaatttgggggtatcattttcagctattcatcttctgcctttgactccttaaaagtgggtcttagcttgtttcggcgttaagtggagagctgtctaaaattagtaactggagagagagacatagggacgaggtggaaggaagcaagagggaagagctggagagatttcacagagcttgggcaatgagcactgtttagatctattttgtgccgaagaaaattcacggccagtggcagcaaagagagaccaagccctgatgttcagccgcgactgcgcgtctgggcagtgtggggcgtgtgtgcgatgcctttgtcatcttgtgtaggcaagccgtgaacagtggtaaggcgttcgcgagtcattgtaacgtaggcaggccgtgaacagtactaaggcgttcatgggtgtgtcactgtaacacaggcaagctgtgaaccgtagtaaggtgtccgcaagtgtcactgtaacacaggcaagccgtgaacagtagtaaggcgcccgcgggtgtgtcgctgtgacgcgggcaagccgtgaacagtagtaaggcgtccgcaagtgtcactgtaacgcaggcaagccgtgaacagtagtaaggcgtccgcgggtgtgtcgctgtgacgcgggtaagccgtgaacagtagtaaggcattcgcaagtgtgtcattgtaacgctgtgtttttctggtgtagatgcactctgttttcctcctacagatgatttcaaactttacagaaacattttaagtggcattgtctccatttcaaatcaagttgcctagcttcctcctaccgccatacgttttctcttcctaatgtgtagacatttcaaagagcttccttatttgagaacgagtgttctttacagacacgcttagatctgtgagccagcatgtcgcactgatgtgctggggtaccggagcgtgaagccatgagcgaggtatttaaaaagcataacagccacattcagcgcccagaggccgatcgcccgtcagagggagagaggtggccggggcagtggagggctctgcccatgtctgtcagacagccatgttcttgccagggcagccagggccgggccactcaagctgggtgcttggctctccctgagctcgagcacgggcacgttcaggtgatcttcctgatagcaaagtgcgtttctgcgcatggactcctgaggagcagcgaggagctgactcacacattctgccaagcccaggctagaaagaggggacagtcggaaccgtagtgttttcttcctgtcaatgctgagagactcactcctgaggtcgcacatccttgccagcaaacggaagacccagatcacagtcctaggctcgtcctggacgtgtagcctttgtacgttccatagtgaccttttgtacattttctcctgtgcgtgttcagccttagaatggcactgtgggcaggcagaactgccggtgctcaccacccccctttcccggggggaaactgaggctcagagagatgccgctggacttgctccaagtcagtcaatgaggcagaaccaggagcgccccaaccccagcgccaaggcccgcatgctctcgcgggtcccagctctaccgttgagtattttcttcccactagagagatgtgatgagcaaagatttccgctcagaactcctaacatccaagtatgagttggctttgcaagccgaaggggagcatggtgtctgtttttcttcagagaatttctgactgtttgctaaggcacgtttccataagaaggactggagagaagcaggccttctaaactgctggagagcatcttgaatcagctctcccccaaagcaacaaaaatacagcatcactgtcaaatcaaccaccaaatctggcagtcagccaagaggacagaacaaacacagatgcattcactcaaggaagagcggccccagggggaagaacaggatggcagcgtcttcacttggggccgctccagccccgaggcgcacagccgtggaaagccggtgacagcacagaccgtggaggagctgggctctgttgaaaaccccatcccaggatgcagtccgcatttggactggtcatggagctcctggaaaaggcccgttccgaggcacaatcaccgttggctgcagtcgtgatcatgggagctgccccaaggctgcgatcgacattggagcaaacaagagcctggccagaccaggtgaccccggggactttgaaaaaccttggagattcccgggcacatacgaaaatggatgtgtgaaggcttcggtacagagagggccccagccactcttctctggctgacctcaaaaccccaccaagcagaagtgagaggtaaagctgcctgtggctgggaggcaggtcctgacacacaggttttgtgattagagggaggagactggcttcgtggctcaaggatttaaggaaacttcctgtctggtaacagcagaccattaaactctgctaaccagagggtgatccctaggcagcctggcttaaagacagaaacaagatttaaaaacagagagaacagaaaactcagtgtccacattctgcaaggaatacagcatctagataattagtccaggaaagtcatgagtcacataagcaacaaccaaggagaggggaagccgagaaacaacaagtcctatttggagggggatgggggggggggaatctcatttcagagtcgctacaatgcattagttgtcatctccagttgtaaaccaaaaaattatagtacatgcaagaaaacatgaaaatatgtcccatccacaggaagaaaaatctgtagcccctgagagggctcaggtattagaccagcaaaggctttaaatcagctgcaataaatatgctcaaagaactgaaagaaattgtatttaaaaaattacaggggagtgtggcaaatatatcttaccagatagagaatatccataatgagatttttaaaaaaaaaaaaaaagaagccaaatagaaattacacagttgaaaagtaaatgaaaaatgcattagagaggctgaacaacagatttgagctggcagagaaaaagaatcaaacgtaaaaatcaacagattatttagactgaggaacagaaagaagaaagaatcaataaaaatgaacaaagcctcagagcatgtgagatgctgtaaacacatatacacatgcataatgagttatagaaagagatgattagaagaaatacgtgaagaaataatggccccaaacttcctaaatttgatggaaaacattattcagtgcatccaaatggttcacaaaattcaaatgggataaattaaaagcagctcacacacagacataaaccaaactgttgaaagtcaaagggagagacaatcccgaaagcagtgagaggaaaacagcttctcagtacgtgggatgctcagcaggattaacagccagctgcttattgtgaatcgtggatgtcggaggacagtgggacggcgcattcaaaatgctgaaagaaaaccactgtcaaccaagaattctatatctagtaaaactcatctttagagatgaagaaacaaagctgtgctcagataaacaagacacacagaatttgttgccaacagacctgacctacaggacatattaaagggagtccttcaggctgaggtaagaagcactggtgagagtaattacataggtgaattaaaaagacagcacaaacatgttttaaacttttcttctctgaactgatgtaaaaggaaactgcataagacacgattgcaaacctgtgctgataacaatgtgcttataacaatttgtgtgacagtagcacaaaggaaggggtggggaaggaagttacagcaaagcaaagtctttacatattattagaactcagtattcatctgaaatagactgttttgactaagatgcttgttgtaatctccagaggaaccactaagaaaatatatatgtgtgtgagtgtgtcacacacacacataaaatgtcaaaaaatgcacttaaatgatacactagaaaatatgtgtgtaacacaaaataagccagtaatgaaggaacatagaaacaatgacaacagcaaaagttacacaagacatgtagagaacaaatagcaaaatggaaaacataatcctaccgtatcaataatcacattaaatgtcagtggaataaacaccccaataaaaaggtagatgttgtcagactggatgttaaagacagaatgaaacagggtacaaccatatgctgtctaaaaaatacatattttagatttaaagacacaaataggttgaaagtaaaatgataaagagatactgtgcaatagtaatcaaaagagatatggagataatggaaaaaatacatacttcagatttaaagacacaaataggttgaaagtgaaaggatgaaaaagataggcagagttaatgtagaaatttggagtagctacactaatatcagacaaattaaactctaagataaaaatattactagaaacaatgaactgtcagtagtcatgttctctttgatcttaaacctgatacattgaacaggaagatataaacacatttgcacataacagagccccataatacatgaaacaagaactgacagaattaaagggagaaatacatagttgaaaaataatagctggagaccagtatatcactcttaatggatagaacaactagacagaaaatcaaaaggatataaaacacttaagactatcaaccaactttacaagacatctgtaggacactctacagagtgcacataggatagacttcctactatgccataaaacaagccttaataaatttcaaaatattctgattgcaatggatatcaattgaaaatcaacaacagatatttccacaaatatttggaaactaaacaacacatttctaaataattaatgagtgaagttagaaagtataagggaaattggaaaatattttgaactaaatgcaaatgaaaacacaacatatcaaaatttgtgggatgcaggtaaggcagtgcttagagggaaatttatagctttaaatgcctatatgaggaataagatggatttcaaatcaataatctaagctttttccttaaaaatgttgaaaaaggagagaaaaaacccaaggcaagtggaaaaaaggaaatgctgaggatgagaagaaaaagcaatgaaatagaaacatgagaaaaatcaataaaaccaaagttagttatttgaaaaaacaacaaaattgacaaaactttaatgagtttttctaacaagaaaaattaggaatgaaagaggggacattgctactgaccctgcaaaaatcaaaaggttataagggaatactataaccttatgccaacagattaaacaacctggatgaaatggaaacattcttagacacgaattacctaaactgactcaggaagaaacagaaaagtataatagacctatagcagggaaataaaagaaattaataatttaacatattctcacaaagaaaagcccagacccagagagctttactggttaattttattaaacattacaagaataataccagtgccaatactccacaaactcttcagaaaatgaagaaggaacacttctaatactgaagccagtatagccctaataccaaaatcaaaagtatcgtaagaaaaactatagaaaaatattctttatgaacacaggagcaaaaatccacaacaaaatattatcaaactgaatccaacaacataaaaaaaagattttacaccatgaccaagtgggatttatcccagtaatgcaaggttggtttagcatcagaaaatgaagtcatgtgatgtaccatattaatagaaaaaggacagaaaccacgtgatcatttcaataaatgcaagaaaaaaagcatttaacaaaatccaacaccaacttatgataaaatctcttgacaaacttagaacacaagggaacttcttaacctgatcaaagtcatacacagaaaaaaaaacagtgatcatcacactgaatcgtccaagacggaggaccttcttttcccctaggatgaggaaggatgcagaggtggccactttcactgctgctactcagccttgtactggaggttctagccagtgtagccaggtaagaaacagaaataaaaggcaaccggaatggacaggaaaaagtaaaattgtctttattggaagaaaacgtgattctatatgtagaaaatcctgagaaatctgcctacaccccaccccccctccccccgccaaaaaggtaaaggaaaacccactgttaaaactaccaaacaagtgcagcaaggtcatcagatgtgagaccagggtacaaataaattatgtctatatgcaaggaataatccaaaaatgaaatcaaggaaaaattcctatctacgatatagcattaaaaagaataaaatatgaataactttaaagaagttaaggacttatactctgaaaatgacagaacgttgctgagggaaagttaagatctaaataaatgggagaacattgcatgttaatggaacagaagaatcaatattgtgaagatggcagctttctccagattgatctggagaatcagtgcaatctccatcaaaactccagcaattttttcttctaaaattcacaaaatgatcctaaaatctacatggagtttcaaagacccagaatagccaaaacaattttgaaatcagagaacaaagttggaggagttacacttcgcaatttcagaactttctgtgaagctataataatcaagacagtgtggtattggcataggacacatagatcagtggcgcagaattaaaagccccaaaataattcttatgtctgcggtaaattgattttttgacaaaggcacaaagcccatttaattggagtaaatgacagcctttttaacaagtggtgctgggacatttgccacatgcaaaaaaacacacaccacgcaccgaaaatgaacttgatcttggactagtaggagccaaaatagtcaaacgtttttggagatagcacatgaggaactctttcaagactttggattaggcagaggtttcttagatatgacatcaaaagcacagctcataaaataaaaacttgataaatggaacctcaccaaaatttaaaatttttatgcttcaaaagtactattaagaaaatgaaaagataagcaatagactagaggaatgtgtttgcaaaacaactatctgataaagggcttatatccagaatatacaaagaacacttacagctcaataataagacagaaagcctaatcaaaaactgggcaaaggatttgaatagacatttctccagacaagacataggaatggataataaacacatgaaaaaatactccacatcactagttattagggaatgcacattgtaaatttcaataagataccattttatatccattcaagtggctttaggagataagatagacaacagccaattttagagacgaggagaaattgggcccctgaagccttgctggcaggagtgtaacatggcattacattccggccacttaggcagtttcttaaagaaatttcttagaagaaacttgccatgtgactcagcagttccactcctaggtatgtattcaaggaaacagatgcacacatccacacaaaggcttgtacatgactgtccttcacagcgttctttagccaaacatctgaaacaaccacaatgcccagcatgtggggaagagagaggaaaggtggggtttatcctcacccgagtgttatccatccccaaaaggaatgagtactgagcaccccaggactcaggtgaacctggaaaccctcatgctctgggaaaaatccacacacgagaccacagactcagtggctcccttgcatgcacacctcagagacgtcgcaggttcagcctcagaccactgggatacagccagtatggcaaaagaaagccgctggagtgtgtggcttccagggcatataaaagtgacgctcacactgtactgagtctgttaagtgtgcaccagcaatgtgtctaaaaaaacagtgtttgtacctgcgtggggtgaccaggtgcattgtccgtgagcagtaatattattaaagggctctttttatgagcagttaagtctcaatggtgggcttaaaaccttcggtaaaccatgctgtgaacagaggtgccgtcatccgggctttgtcgctccatgggtggcgcacaggcagaggagattccgcgtcattcttaggggccttgggattttcggggtggcagatggacactggattcaacttaaagtcaccagctgcattagcccctaccaagggggtcagcctgtccttggaagctttgcagccagacactgagtcctctccagctatgggagtcccagacggcatctccaatagaaggctgttttgtctgcacagaaaatctgttgtttagtgtggccaccttcaccaatggtctcagccagatctcctggagaacttgctgcagcttccccatcagcacttgctgcttcatctttgcttttatggtatggagatggcttctttccttcaacctcatgaactagcctctgctggcttcaaacttttttttctgcagcttcctcatctctcagccttcgtaggacagagagagcgagggtcttggtctggattaggctttggcttaagggagtgttgtggctggttcaatcttctgtccagatcactcggactttctctgtatcagcaataaggctgttccgccctcttatcatcggtgttgttcactagggcagcggttttcacttctgtctgtctagagttttccgctgcattcacagttggactggcgcgggaggctgagctgtcagcctgtctcggctttcgacgggtgttcctcaccaaatttaatcattcctagttttgaagtgagagacgtgtgacctttccttgcccttgaacttttacttgaaaacttggaggctgtcgtagggttcttaattggcctaatgtcagtatggttgtgtctcagggaatagggaggcctgagcccagggagagagatagagaatggctggtcagtggagcagtcaggacgcacccagctcttatccattcacttcatcttagatgggcacagttcgtggcaccccaaaacaatgacaacagtaaccccaaagatcacagatctccgcagcagatatgatagcaatgagaaagcttggaacatcatgagcattattgaaacgtgacacagagatatgaagtgggcacctgctgttggaaacgtggtgcccacagacatgcctggtgcagggttgccaaagacctcccctttgtgaaaagcagtgtctgaagcacagtgaagtgaggcttgcctgcaagacatccacaaaaggcgcagctctggagacaggagactgctgcgtgggaggaggtggtgctggaggcccttgggtgagggaagaggcaggagactgctgtgtgggaggaggtggtgctggaggcccttgggtgagggaagaggcaggagactgctgcgtgggaggaggtggtgctggaggcccttgggtgagggaagaggcaggagactgctgtgtgggaggaggtggtggatgagacccttgggtgatggaagaggcaggagactgctgcgtgggaggaggtggtgctggaggcccttgggtgagggaagaggcaggagactgctgcgtgggaggaggtgatgctggaggcccttgggtgatggaagaggcaggagactgctgcgtgggaggaggtggtgctggaggcccttgggtgagggaagaggcaggagactgctgcgtgggaggaggtggtgctggaggcccttgggtgagggaagaggcaggagactgctgtgtgggaggaggtggtggatgagacccttgggtgatggaagaggcaggagactgctgcgtgggaggaggtggtgctggaggcccttgggtgagggaagaggcaggagactgctgcgtgggaggaggtgatgctggaggcccttgggtgatggaagaggcaggagactgctgcgtgggaggaggtggtgctggaggcccttgggtgagagaagaggcaggagactgctgcgtgggaggaggtgatgctggaggcccttgggtgatggaagaggcaggagactgctgtgtgggaggaggtggtgctggaggcccttgggtgagggaagaggcaggagactgctgtgtgggaggaggtggtggatgagacccttgggtgatggaagaggcaggagactgctgcgtgggaggaggtggtggacgagacccttgggtgatggaagaggcaggagactgctgtgtgggaggaggtggtgctggaggcccttgggtgagggaagaggcaggagactgctgtgtgggaggaggtggtggatgagacccttgggtgagggaagaggcaggagactgctgtgtgggaggaggtggtgctggaggcccttgggtgagggaagaggcaggagactgctgcgtgggaggaggtggtgctggaggcccttggatgagggaagaggcaggagaccgctttgtgggaagaggtggtggacgagccccttgggtgatggaagtgttctgacacctgcagtgatggtggcacaactgggcacctttaccaaaaatcactgaattttgtgcccttctcaagggtgcattacctgtgtgaaacgtgcctccgtagaatgctgtgtgtttagggaggggctgggagaccctagcaatgccacgtgctttttacttttcttcaactgagttttgagcattttgttaatgcaagaaaaaggactccttataaagagcggttcgccgtggggtctgagcctgtggcgtggtttcagttgcctcctcagccgcagtgtggagaggaacagtggtctcggccgagcagcggctgtgggcacctgcgtgtcagcccctccctccgtggacagatgctcctgagcttccccagcaaagacactgggactgtgcgccttgtccccccatcttcccacctccggtgaccaggcctctcccagggaccctctgtgctggcccggcacctgctctgatatgccctccccaggggtgtgggtccgtctgccctccacacagcccttggagcctctcttcacagggcctgagagctgagtgtggtttcataacgtggttcattggcctctgaagatgctcagtgctgggggaattgggcttgaagccatcacgtccaacacacggtccctggaccatgtcctgtagggagtgttaggaggagtctagctctatttttaaatgacagtgttcatgacagaatttctcgtagggaataaaaatgtgtgtgcttcccagttacttattgtgttgcttaattaagaaatctctttagaaacacagacgggagcatgaacttctcagccacttcctgcctggcttctgggtggttctgtgttgcattactggaggtctgggtgtggaattttgagaatctcttgatccttttcagtttaattctgaaacagggttcttccttccttccagattacagtgtggacactcacacacagtaagggacaaagaaagtgtatccccttccaaagatccgcccaccaggccccggacccataatcaaagcctgatactgggacaatggacccagcggccgggccagccctcccctagttatcaccccagagctgtggctgggctctctttgttccgaaacggagctgatggagcaggacgctgtcgccaggcactgcggggagggggttatcagcccctggcccgcgtcccaccccagaggtgaagtcttcgccccagacaggccctatcaggccctcccagctgctgttattttagatatggcaggaagtagggcctggaaaccgcacggctcccagcccttggcagcagctcagttcccgaggctgcactcagagctggtggcagggagggagaaggcacagcagcctggactgcgggttagagggctgtgccggggccggtggagccatgcgagcggccgcgtaaatcaggcaggcgtggccggcaggctgtggctccccacagacatggggctgacggtgtgcagcgctggctggcgcagcctctgccaagggagcccctgccctccggggcagcaccatgaagacctcacccctcaagtggatgggtttgcagttcagcccagtgtctgttcagctggcaccgatgggcccagatgtcctccctggcagtgtctcagcaggcgcacagacgagccctgggccaggggacaaatgtgtgggttcctgacgcacgtcccccggagccctagaaaggacaccaggcttctgcacccccacccgtgatgtgttgcaagaagcctcacgagtcagtaaagaaaaaccttctccctcgccctctgaaatagtaaacgttagtgagcgcattcgcatccgcagtgcttttacgtgagaagttaggttttgggagctttcggaggagctggctgtggagggaaacacgtccgtcacgtggccaccgtcccgcgggaagctgggggccgtcgctctggccgggctccccgcagccgcagtcgccgcgtcaggcggaggatccctgttatgtactttcccttttccacagtagctgctgccagcgggctgtaaactaccgtatatcactcagatttaagaacccaaactttaaaacaaattaaactcttgttgacattgtaataaaaatcagaatggaactgaacagctcagtaaaagtgaacttcaattatttttgtggatttcagattgttttctgggattcccagactcccagtgcagctgagttatttcctcttggcagaaggctggagaaaaaaggtggagggagggagggacggacggacggagggcgcctggtgggaggaagcctggtcacctggctggagggagggatggacggacagagggtgccgggcaggaggaagcgtcgtcacctggcagttcgctcggcctgaccagcagccacagggcagcggcgtgcgtgtgagggttgggtgagggggcgcatgggcaggtgttttttatgtgttttaatttaagaaaagagctcagaaatgtttgtcagagcctatctgttaattaggtgtttatgctggattaaaagaaaaattgaaagcactagtctgactgcccctcaaaaatgtgctcgaaggctcataaacgcacggagggtctgaactccctcccctctctctcggtctttctctgtatctctatccctctctctgtctctgtctctcggtctgtctctttctcagtctgtctctctgtctcccttcctccctgtctctgcctctttgtctccctccgtctctgaatctctgtccctctctccatccatctctctccgtctccctcccttcctcgctctgtttctctgtccctctctccatctctccgtccatctctctctctctccatctccctccgtgtgtctctgtctctcttatctctctccctctgtctctgcctctctgtctctctctccgtccctccctccctccctttctctctcatggcggccttttcttttgttgctgtgttcactgtgatgtctggttcttttcagctccttttctctgctggagtggacagggttgtcggtctccactgccgtgccaggtgtctgtgcttcttgcagtgtcctgtacggagaaagcggagaactagagcattggagagacccgcatggaaggaaacgccattgctgggcagtgttgcagcctccgcagaggtgtgtgggctccggggagagggacgtgctggcccctgtgcagtggcgtggcccgtgtcctttccccgccgtccacttcctgttccccttttctgcacctgtctctagctgccttcaaggcggagctttggcacccacatatgcagatgtccaccgcgcctgccggacgccagctctccaccagccggaactcaccgccacccaccctgggctgccagctcagctggggcccagccactcccccaggtcccccttcactgtaggaggagctgggcctgggatgtggacagtgggcggcgagggggttggccatgcagagggcgtgggaggagaggagagcacgcagatgccggcccggtgatgtttcctcagacgcccgcgcagtgccatgccgtgggcctcacatgcaatgctcccctgcctagaggggcacccctgctcccaggagggtctcaaagagacctgggtttcttttaagcagttttgaccactttgattaggtcagtgatctccattagatctggacctgctaaagttacagaaggttctggaaggtgccggcacagtctgagctgaacacccatgacacctgagcaggaggctgtgacaactgtcagctcacggaccagggagggaacgcgaagctggggagctctgagctccaatcccagcttctgctcctgctcagaaagccctcccactttctctgggctgacctcacctcggtgtttggaaatggaccaagacttatcggaaagtgtcctcggcgccaggtaccacactgagctcacaggctgcttccatttaaagttaaccactcttggtgcagccataaagcctcgttgatctttggtcctttattgtgaacagacatctcgaaagagcctgtgtctccacggtcaatctttcttctgaagacatattttaaggcttcttcagaaaccaaatttaggaaaacagaagaaattagtgcttagttttccagataactcatagccccccccaaggaggaaattcagacaggacagcgagcaggttcccgggccgtcacttcagggtcacctgatgggagccgcagccgtggtgaggttcgctgggtcatgcccccgtgcggaaactcagggatgggacggattccactttcaaaagatgacatagaatgagtgagtatttaggaattactttagggctaaaaaaaaaccacatatggggatcagatccctgagccctcagaaaatcggagtagggagagggagaacagttgaagcgagaagttaaataattcacgtttaaatcacaattccaggtgagatgaatgcggccctacctgatggcacctgcgtggttgccacaggcgtggtggagggctcttgcgtttggatttgaggggcttagaggtcaaaaaacttttcggaggaacagggatgggcctgtctctcttttatttcagcggtcttttctgtttatgtgggaaacgcagtgtcatgaggtttgaaaccctgaggatgagatgcattcccagttgccaggctcggtttccaagtctgctgggtttgggagcggtcggttgatagaatttcttctagaagacagggtgtgggggcacccaggtccttcctgcggaggcgtccctgccctgtgtggccctgggcacagaccccggcatcccctccacggggctcctctgccggggcatcctctgccggggcatcctctgccggggcatcctctgccggggcatcttccgccggggcatcctccgccgggacatcctccaccgggggctcctccgccggggcatcctgctccggggcatcgttcgccggtcttgtcgctgcggtggaagtgtcgtgttcccagccaggctgggagtggtcgctggcgaggcctggcgtgggcccgcggtgtctgtcagggtgccctgggccagccccgctgattcgatttagagctaacgagagtccaccaacggcaattacaggaacctaatggccttcctgccgcaccgctccgtggcacccggctcgctgtgatgaattgctcattatgtgcagtgttggaatagcctccacaagattaataattggataatcaatacagaaattcaatcttggggtgtttttttcactccggggtcaatatgtcctgaagattacaaggcccgactctgcctcccccctccccgctgcttccgcgttgggagtttggccagcacctcgccacacgatgggtcatggtgcgttgtctccgtacctccgtgacttttctattctttgcaaacagcaggttctgccgggggtcagtgctgctaacacagacagcagtgactccacggtggcttccgttaagccaggggagggcggcacaggtaatggctgtgagggcaccagggccatggcacagtggcggccgtggagggaagcctcgccgtgcccaggatgtacgtagcctgagctgtggaggggtggagggcaggttcaagaggggctgtgcctcccgccaggacacgtctgcgcccctgagctcctgaggcagtcagggcctggatttccctcccagaggtgctcccctggctgcagcatggggagctgcctgcgtggtttcgaggctctcagtggggggccagccggtgaggcactgagctggcccgaggagagctgctgaagctcaggacgtgcagtggagctgggagatgtggatggacttgctgcgggtccgggacctgcctagggagttggcaggattcggggcttctgggggaggccaggaacagagggcggcacgggcctggggagagcaggaagctgtgtgctggctctcaggagcccagtggatgggacgcagctgagacgtccgcagccatcccaggatgcgcaggtggcgggagcacgcggggcacaggagcctgtcccggcaatggctccttgtctccggcccaagcgacccctggcatggcggacagagaggcccaggaggagccggcctcagggaggatggcttgaggagacaagccccaggacgcagcctgaccccaggacacggcctcgccccaggacacggcctcaccccaggacacggcctcgccccaggacactggcgagtgtttggactttgttgaaactgcgccacaggcactgccctgggaggtaaataaacggaaaagcgtctgactgcagcaaaatcctggcaccacctggcactaggacctctcccaccacgtggagtttagactaaggcttagggattttatgagaacggcagccactccgccacacccacacaccccgaacttttgctttgccttgaatttttctagacagcctcccaaggaggagaagcaaccctggctaggaaccggagccggagcagcatctgtggctccacgaggtcagagccttggcagttgtgcggctgtggactcacacatgtggcaggaggagatgcctgcagtcggcgggccccttgtgcttcccgtttgctgagctgcggtctctccagtcggtgggccccgtgtgcctcccccgtttgctgagccgtggtctgtccacctggatgcggcacctgtgccctctgctgcgctctgggctgtggctgccgtttgaacagtggagcctgcacacgtgagccacgtctcatcccactcgagctctcagcccctgtatgtgtcagggaggtcctgagggcgccttctccacgtgctgcggggaggcgcgctgacggccaccaagtccactggaagaaatagccttcccgtgtgaatgtggggtgctgcctgcagggacgtcctgaccgtaggtccgcaccccacccacaccaaatcgccttccgtacccacctggctcatgtgcctataagatgggagagggcctggcagagaatttcgctagagacgcagggagttgtatctgccatgtttttaaagagcgctttaaaaacggtatcactttcgaacgctcggctctcaataaaaaggagcactgccagtattttaattcctctctcgatacccagaaccaccaccaggctgtgtcaactcccgtcggcgtagagcagctgatgcccgcgggtggactccgggttcagggcactgggaccgctgcagagacgccgtccccggcccccacctgtagggtctgcagggagatgacctgcttcccgtggcagagggcaccttggcctccgcggccagggcgtgaggctcccgggtcagcacacggctttctcaaggaccaggcttgaggatctttcccttttctgctcttccacccgcctcccacccaccttcccagatacccgcgtcatcccccgaggcttctgaggactctgggctgtccccaaacctcaaacaaaatgtcactttaaaaactggtacaaaagcacctcttaaagattcaaacgataattcgaaaacatcgtggtggtgagggacacgtgctttcccgccggcgggggcgtggacgtcgtctttcgtgggcagccctagagaagtactcttcaaggcgagtgtccctggggcatgggggcggtttcccttgcagctagctcccggtctcctccctctgacccagggctccccagacattactggggctgcatctgccgggggtgtgtggcctgtgtgctgccgagctccaggtgacacccacggtggttcgtggacactcaccatgaggggaggtgcgtggcgtggtgaagcctgagggtacactggctgtgccatgtgcatgcccacgtccaggacgggccactgtggagcccatggatcctttgtctccctgtgtgctagcctctgtcccttctcggggacgtgtccccacctgagctggccgctcactgtgcttcaggctcctgtgaaggccgtgctgatctccacggtgagcgtggacgtgcgtggggcagagtgagcggagtggcaggttcctccaggcgctgcccaggttcagctgtgagccggtccaggtgtggccgcagggattggcgttcccatctagttgtcattgctgagatgtttaaaaatcacaccctcagccagcacagtggctcacacctgtgatccaagcactttgggaggccaaggcaggaggattggtgagccaggagttggagaccaccctggggcaacatagcaagaccccatctctacaaaaattttagaaattagccaggtgtggtggtgcacacctgtggtcccagctacttgagaggctgacgtgggaagatcacacgagcccaggagttccagaccagcttgggcaacatggtgaaatcccacctctaccaaaaatacaaaaattagccaggtgtgttggcgctcaggagctgctcaggaggcagaggagaaaggatcgcataagcctgggagatcaaggctgcagtgagctgtgatcgaaccactgcatctccagccagtgacagaatgagaccctgcctcaaaaaaaaaaaaaaaaaaaaaaaaaaaccaatctcactccccacccccaccaccctggcatgcctccgaagcaggtgtcttttttaaatggccgttttcttacatagccacagtgcaactttcacacctaacaaaatggcagattctctggtaagaggaagatttagttgaaagtcacattttagtaaggcaggtttggggctgggtacagtggctcacacctataatcctagcatgttgggaggctgaggcaagaggatcacttgagcccaggagttggagaccagcctgggcaacatagcaagaccctgtctctatacaatttaaaaattagccaggcatggtagcatgcacctgtggtcccacctacttgagagtctgaggagggagtattgcttgaacctgggaggtcgaggctgcagtgagctgagatcattccactgcacaccagcctgggcaacagacagagcaagacgctgattctaaaaataaaatgcaggccaggcacagtggctcacacctgtaatcccagcactttgggaggcaacggcgggcagatcactgtagctcgggagtttgagaccagcgtggccaacatggcgaaaccccatctctactaaaaatacaaaaattagctgggtgtggtggcaggttcctgtaatcccagctactcaggaggctgaggcaggagaatcgcttgaacctggaaggttgcagtgagcagagatcgcgccactgcactcctgcctgggtgacagagcaagactccatctcaaaaaaaaaaaaaaaaaaaagaaggaaggcaagtttcccatcccacaggagtggtggtctccagccacctcctttgggagtccctggcccacaggatacctgcagtggtggtggtgggcgggtggtggtggtggatgggggctcggagggggctcggctcacacccctgcagcctggccggggaccaggggcgtattggcttctgagttgccaatggagcttttgacctcctgctgctacacacttcacatggtgacattctatcctgaccctctctgccaccctacaaagaaggaggccgcctgatcagtgccagttcacaccaagtgcccgtctccccctggaacaggcagaggaagaatcgtgtttctgtagcagagggacaggaggaagcgggacctaccgagacccaacccggtcactctcctcggggtccattcactttatctttattaaaaggagctttaacatttttattttttaaattctgttaattctgtttgaaatggaatttcataatttgggggcatatacttcctagtagaacaaagaaagccctggaaaactgcaagtggtggtttaatgatcccagtgagtgactggaatggcagtttggtgcagataagacggactagatccgtggaaacacgcgcccgcatgccgtctcggtggggggcggaaggacagcctgtcggaatctcccaggcacgtggtcctgtaccctgaaccctggcagtttccacacggcgtttgcattctgtgcaacattcaggctaaataaggaagcaggcagttaaggtaggaaaattattctgtcttaatggctgacgtcccgagtggcggtcccgctccccaccaccagctgcgtccagatgaggggcttgttttatgaaaactgtgacttgtcaggccgtccctccgttgtcccgtcctctccttccaaaaatagcaggccctgtggcggtggcttattgcgatgaaaaagataaaaataagtgaaggctgaaataggtcctggacttgagaacttactttttaatgaaacttgagaagctgttattttccactgctttacaaagcatctttgaaaaatgcagaatcgtaaagaagggttctagagacgctgcgaccctgcgttttcagaatgtggtggctcctcgactgtggagtggcagaaccgcccttgttcttaccccgtttctcagccgagcgccgggcgcccagcagtgtcggacagtttagggtggaccgaggaggccgtggtggaggcttcatgtaggaggttatggaaaatccagatatttgcttgtgaaggaggaaacatttatggtagactttctaagaggttgcttcttctcaaaaaattaaaaaacccacatgagaggcggcctcttcagttaccttggcgcacacaccgaagccacctctgcatcagacacgatatacgtacagtggaacaaaagcgttttcctcttcgcttcctattttctgatctctaatttgtggctttaaccatatttttatgtacttagctcatatctactgtaataccttaaatgagagccatacaagtctaaatgtgtatgtcagatggaaaaattgaaagctgtgtattcagcaattcaatgaaaccataaaacagtcagtaaacacatctatcatgcccctttgtaatgaacgccacagccatgaaaatccatatgttcattaaggttttcaaccaccatcaaatggcgttcttactccaagaattattagatattgtcaaagctgagtacagcaaatgtcattgggagacatcttagaagttagttatttaagaataggatttggcctgagatatttctggttctatctgtgtcctacccaaattattaccctcttaggttacaagactaactttagctaaaggtgtattttctgggaaggttagcaaatactttttataattatctcttagttataggaatggaggagaatgtctttcctgttttgttttgctctttttaaaaagttatttttgatgacttgtcctctgaagaatatgcacttttctgtccctcagaggatggtggagtaagctggggacaattgcgttcctgctgcaggtttaattacgctgtgtccagtgggacggtgggccttagaagggagcctgctggacggaaagtgaggcggatggggacgctgcgacaggaagaggcaataggaacatgcccccgtaggccgtgggtggcatcacgacggccttttttgtttcctgtattgctttagtgtaaaggaaaatgacaactctaaagaaggagcagtcctgcaggacgttctgatgtctgataattctgaggcctgtgtccttgccaaactgtctggtttgtttagcggtcatagataaatactcttagacttgaataatcatagcacaattggttgttgattggaactaacataaccattgaaaaagagggaagatgcttttaaatgtgttttgtgcaattaagttagtggtacctatatgaacaaatatgctttttaaaaattgacacaaaaatcgtttatgcaagttatagtcttcatctgtgctacttaaactttttaactgcaaggattaaacagtgtatttgggttagcgtggctgaaccacattgtttattctttaagcccaaatccagttcctaaaaacaattctagcgctgcctctcccggctcttcactgcacgcagcctgagggcgtcgttgtctgtgctgcaccctggtgctcagtgggtctccagctggcacagtcaccaccactcccagatgggctctgccagggacagggatggagcagactgcatgggcctggcgtgcaggtgaccaggtagaggcagctcagctgtgtctgaacagcttttcccatcgctttcccggtcgacattcatggcagccgctgcgtccaatgacaggcacagtcaattctttgagacagaaagggaaggacaacactaatgtccccatgaaccccagaaacatgaaggaggggcacacgcccacagtagaacatgtggaagctgagtgtggcagtgtaaagggcgatggagcccccgggcccagcatgtttcgcgctgcctgcttgtgttctgatgggcggtaactgaaggtccaccaggaagtgcctggcaccccccctctcgctcgtgaaagatgcagatcagagcacctgagagggtgtccttgacaagtgttttgtcacatcgttcagccatatagaaaacagacttggaaaaatctgagatcccccaaggagccaccgctcattgcccagggcgtggcccacagcaaggctgctcctgcccccgctactcaccgcagtgtgaggatgggctgacctgaccgcccagtcctgtcttcaaaacgagactaagggtagcacccagctccaaggagagctgtgccgggtgctctggaggggtgttaggacccctggcacccggtgtccctcagtggacggccgttgattctgtaacaaggcggccagtgcccacggtgcaggcaggaggcaccttatccctgacttgggctccgatccaggaggaagttgtttctccgtgtgagatgctgaagagtccgcccattcacagagcagaacggggtctcagtcaaacctcttcccacagattagcccccaggatgtgtcctgagccctgcaggactgggcagaaggtgaggatgggcccttccaggctcccttttgctaaaccttgttctaccagagcgttcaggtgcaaagacctcgcctcagaaaggcttcagagcctccggcggctggcaggctgctcacagatctccgaaccatggtttgaacaaggcagcaggaaagtgggagaattttagtctgagaagatttggaaaatccttaggaattgctgacttccaagttgtttcactaccatctgaaaaacccttacaaggctcgggctttcctggaaaacaggagatcaggctatttattttttatttttttattttttttcctgagacagggtcttgctctgtcacccaggctggaatgcagtggtacaatctcagctcactgcagcctcaacctcctgggctcaagccatcctcccacctcagcctcccaagtagctgggaccacaggtgcacaccaccatgtctggctaatttttacatttgtttgtagagatggggggtggtctcactacattgcccaggctggtcttgaacttttggcctcaagtgatcctcccgccttggcttcccaaagtgctgggattacaggtgtgagccaccatgcctggtcttaggtcagtttttaaaacaacagcaagattttttttatgttgtttctgccatgttttaggaattgcttttcctcccggggcttgcatgtttaaatttttattctcagaacgttgaagggacgcactgcatttcaggatcctgggtctccgtccgtgaaggactttccttctgtgggtctttcctcttgcagcttaaagtgggattattttcactttattcagaggccctgttagtcacagccaagcacagacgtgctcgctgtcgctcctttgctggagtcggaagtaggacagttggtgataaagtcctggacgggcgagataagtggcattggcagagctctgttgtccagacagcaagaaaccggctgcccccaggaagcggggatggagggcacacaccaggagagggggcgttttgaccgtcggcaggggtgccacttggaagtcagatttaaaatggaatcaaaactggtagaatgagggtctgcagggggaaacttgacggagcccatcaggcgacagccttctcgaagcccctccgggcccctcacgggaggggatcccccgctgcgctgccgggaggtccggacgaaatgttggagctggagagtcggcagccctcgcgtggcgttgctgcctctgcagatgcctccggagggactcggtgtgtctcggtgttgatttcagaacaggggagatgctgacgtgtcccggtggctctcacagcacagtggaaggcgagtggcagctccgacatcctgctccgctggcgcctctggccacctgcctcccccacccccacataaaaaaagtttaaggcacatttaagctagtaccggagaaatgactgaaaaataagtatagccaagcagcagaagactctgtgtgtgggggggggagggtgcatccaccactaatgtgtgtccgtgtgtgtgggggcatccgctgatgtgtgtgtctgtgtgtgtgtggggggggcatccactgatgtgtgtgtctgtgtgtcggggggggcatccactgatgtgtgtgtctgtgtgtggttggggggcatccactgatatgtgtgtgtggggggggggcatccactgatgtgtgtgtctgtgtgtgtaggaggggagcatccactgatgtgtgtgtgtgtgggggggcatccactgatgtgtgtgtctgtgtgtgggggggggcatccactgatgtgtgtgtctgtgtatgtgtggggggggcatccactggtgtgtgtgtctgtgtgtgtgtaggaggggagcatccactggtgtgtgtgtgggagggagcatccactgatgtgtgtgtctgtgtgtgggggggcatccgctgatgtgtgtgtctgtgtgtgtgggggggggcatccactgatatgtgtgtctgtgtatgggggtgggagcatccactgatgtgtgtccatgtgtgtgtgggggcatccgctgatgtgtgtgtctgtgtgtgtgtggggggcgtctgctgatgtgtgtgtctgtgtgtgtgtgtagggggggagcatccactgatgtgtgtccatgtgtgtgtgggggcatcagctgatatgtgtgtctgtgtgtggggggtggagcatccactgatgtgtgtccatgtgtgtgtgggggcatccgctgatgtgtgtgtctgtgtgtgtgggggggggcgtctcctgatgtgtgtgtctgtgtgtgtgtgtgtagggggggagcatccactgatgtgtgtgtgtgtggggagcatccactgatgtgtgtgtctgtgtgtgtgtggggggcatccactgatgtgtgtgtctgtgtgtgtgtggggagcatccactgatgtgtatgtgtgtgtgtggggggcatccactgatgtgtgtgtctgtgtgtgtgtggggagcatccactgatgtgtatgtgtgtgtgggggggcatccactgatgtgtgtgtctgtgtgtgtggggggagcatccgctgatgtgtatgtctgtgtgtgtgggggggggggcatccgctgatgtgtgtgtctgtgtgtgtgggggggggggcgtctgctgatgtgtgtgtgtgtgtgtggggagcatccactgatgtgtgtgtctgtgtgtgtgtggggtgcatccacagatgtgtgtgtctgtgtgtgtgtggggagcatccactgatgtgtatgtgtgtgggggggggcatcccctgatgtgtgtgtctgtgtgtgtgggggggggggcgtctgctgatgtgtgtgtctgtgtgtgtggggggggcatccactgatgtgtatgtctgtgtgtgtgggggcgtctgctgatgtgtgtgttttgtgtgtgggaggttgtctgctgtgtgtggggagggggcatctgctgatatgtgtgtctgtgcatgtgtgggggggcgtctgctgatgtgtgtgttttgtgtgtggggagggggcgtccactgatgtgtgtgtctgttggggggggccgtctgctgatgtgtgttttgttttgtgtatggggagggggtgtccactgatgtttgtgtctgtgtgtgtgtgggggggtatctgctgatgcgttttgtgtgtgtgggggggggtgtccactgatgtgtgtgtctgggtgtagggggggtggcatctgctgatgtgtgtgttttgtgtgtagaggggtgcgtctactgatgtctgggtgtaggggctggcgcctgctgatgtgtgtgttttgtgtgtggtggggggtgtccactgatgtttgtgtctctgtgtgtgtgggggggggtgcgtccacggattgtgtctgggtggggggacgtctgctggtgtgtgtgttttgtgtgtgtgttgggggggtgcgtctactgatgtctgtgtgtggagggtatctgctgatgtgttttgtgtggggggggtgcgtccactgatgtgtgtgtctgtggggggtgtctgctgatgtgtgtgttttgcttgtgttaaaaggcgcacaccgcaggaaaggaaagtggcagtaaacacccccgcccccagccttccctcacctcagatacgccaagttccgggcactgagcaccctgcaggtgaaacagggaggaccagagagggaagggacgggggccagatttggaggagagaggacggactcctggggccaggagctggctgggcagggtgggaaccctcctgtcccagggtctgagtcgtcccccaggcaccagccagtaggcccatccagctttccatgactttcctagtaagtactgaaagaaaaaacacacatctaacactgtggcttgcccagcggggccccaggccgccatctgggaggatctgggggcaggtggctgttcagggcccagcagagccggctgagctcagaccccagtaagggtcagtcctgccctgtcagctctggggtccctggcagccattcccactctccgagccctccgtggtccctgtgaacagactgggtgactacagtacctgcctttgccgctcccggggctgttgcaaggagcaagcaggtgcacaaagggccaggcagggctgcataactgctggggaaatggtagtttgttcattccttaaaatgtaagatccttaattgctttcagaaaccgggcattcagaaatgcagaaaaatgttgcttccaagccaggcagcaagggggcaaaatatatcaaacagcgttcaggccctggcagctccgttctggccctcatcattcccagcatagagaaacaaaactcctgcgtgaaacttaagaggtgaactttgggtagctcactacagggtgaagtttaaatgtcaactttctttcaaaatgatgatcaaaaagaagaaactggttatgtgaaggtacgaatacttgactgagaaaggcgtctcgcctacggcttgtttacgcacagctagtgagagcttgcgtggccccagcaagggcacagataagattcacaggtgaggcagtgaaagccatgcctgcccttgtacttggtagtttttatatttaaaaatgtactgatttcctccttcactcaattccagatgtgtatagagaggtgggtatgagtgtgggtgtgtggatgtggcctcgagggaggctctcagcctgcagccaggattcaaaacgccacagtcgagttttaggaaaaaacaatagtttccacctgaggagtattttagagaaaaatctaatataagggaaaaaaaagccctccttattaaattaaattgtggtataacagctcaccacatcctgttgcggggacatctgacgttaggcaaagtaagtttcctctttcaggtctcccacacgccgtgagggtcacatgctacctgcaattcaaaatatgctaggaagggaaaaaaccctttgtgtctgtggaaaagctgaataagaagatggaaattatcagcagagagagctggtatgggaaaccgtaggtgtcatcggcaaccataccctacccaaggaagccgcccccggaatagcaagggcagggccgggcagctgtggctgacctcatgggtcagaagtgctcgtggcgggaaggagttggggggtgggggggcggtcctgtctttcagcccagcgccagcgagccacatggcctcagaccaaccccaggatgggcccgttgtccacctgtgaaaggggaagccgtggctttcctctcagggctacggcacaggccgtgtctgcggggcgagcacggctccacgtacggctctcgtccgcggtgtggatgggtgggcggtacagcctcctctgcggttcggttgctgtgctgtcctctgctgagtggtgtcagggttgtccatcccgctctctgtcagctgctgccatggggcagcgggaaggccctggagggtgcctgggctgtgtctggtcccggccacgcgtccctgcagcgtctgagaccttgtggaacacacttgacccggcgctgggacggggtcggcccacacgcaccgccagcccgcaggagtgaggtgcaggctgccgctggctccttaggcctcgacagctctcttgaggtcggccctcctcccctcccgagagctcagcagccgcagacccaggcagagagagcaaaggaggctgtggtggcccccgacgggaacctgggtggccgggggacacaccgaggaactttccgccccccgacgggctctcccaccgaggctcaggtgctcgtgggcagcaaggggaagccccatggccatgccgcttccctttcaccctcagcgacgcgccctcctgtgcccgcggggaacaagacggctctcggcggccatgcaggcggcctgtcccacgaacacgatggagacctcagacgccgtccccaccctgtcactgtcaccatcacccatcctgtcccctcacgcctccccacatcccatcattactacccctcaggcctccccacgtcccaccgtcgttacccctcagtcctccccacgtcccaccgtcgttacccctcaggcctccccacgtcccaccgtcgttacccctcagtcctccccacgtcccaccgtcgttacccctcagtcctccccacgtcccaccgtcgttacccctcagtcctccccacgtcccaccgtcgttacccctcagtcctccccacgtcccaccgtcgttacccctcagtcctccccacgtcccaccgtcgttacctctcagtcctccccacgtcccaccgtcgttacccctcagtcctccccacgtcccaccgtcgttacccctcaggcctccccacgtcccaccgtcgttacccctcagtcctccccacgtcccaccgtcgttacctctcagtcctccccacgtcccaccgtcgttacccctcagtcctccccacgtcccaccgttgttacccctcaggcctccccacgtcccaccgtcgttacccctcagtcctccccacgtcccaccgtcgttacctctcaggcctccctcctgtccctgtcgctgttacccttcagggtccactcatggcttcattatttctttgtagtgtccccacctttcccctgtgttgatcatttaggcctctttcgtccccacaatcactattctgactggagtcctttcttttggagctccgctggccagggttggatgaggacctgagcccagtctcttcatgcattgggcagcctcccttcccccacaggtggggcctgttctgagctacctgaacccccaccgtgtcttcctcctgggcaggtggctcctcctgcctctttgcagacgtcttttgtagcaaggctgaaccagcgcagtgggaaaggagttaactggtctcgaattctggggcatccctgtctcgtgccacagatgccaagcacagcagggcacggagctcctgggggccgctgcactcagcagcacagtgggcgggaggccgctgagcaaccagcagcctagggcatttgggtggggacgtgcgacccccacacagaacagagccgtctttctctctgcgttgtgccgaggccccgcagcgccgcccgagtgtcacggaaagtgcctctggtgaggagctgccgtgcgcactctgggacaagtcaggtcctgcgtgccagtccgggagcagcctgcgagcacctgggccctgtcgttatcctccttagtgtttgtgaagagtcacacggaggggcgggagcccgggctccttctggtgccttccacactgggggcggagccctctgcagagagcctggctctgcgtcctgtggctgagtgccaggtcccgtcttgggcagggcccaggatcagcgtggctctgagcagggcctgcggggagcccacgcgtgcctgtgtctttacagaggctgagctcccacacgggacagagtcgggaccttctgtgggcgccatgtcaggaggtgctgctggcggggccgggcatgtggggcacctttgcttgcctgggtctctggccccgcagagccttgggcgagccagcctcgggtgtgtgtttgcagccagggttcctcctggagctcagtgccagtgtgtcctgttatcagttcccatgacacaattcctggttctccatctgtgttttattattgttattcttaaaaatagtcgggggttgttgaaagggaatttggggaagggagtggggtgatgaaatgcacactactaattgctccaggaagccgccctgagacaggccggggcctttgcagaaacacgtggggcttatctgggctctgggcgctccagcccatggcagagggaagcccgggcagttccgtgacgtcagcgcacgccccaccagaacctgggagggagatgggacgtggcgacagtgctggtggcacatcccctatctcagcgcccatcagggcggccacagcaggaggtgggtggggcggggatgcatgcagctcacaaaggccctaacagtgccgctcgtttcctctgcgtctgccagaagtcacaggtgacggggaacgtcactggcctgtgggggactcagggactctgccatccaaagggaaataaaaatcaggaagagcctgagagggaggctcaggcgacactggtgctgacaccacagaagtgctggtgtggacctgtgggtcgcttggttcgtggagagacagccacagcatcttcccagcatcgcggccggcacctggcacctgcactttggccgtcagagacgtgctggtaccgtgctacggacgagggcggtcactctggcgaccccagctctctgccgaggcagccaggcactggctcacgacactcatggaccagggtgggaccgaggaggaaatgtgggttcctggggagatgccttgtcacaggcgtgagcgtcactgatggagaagcagggctgggggcgttgctttgatgtttatggtatttctctaatactttctcaatttttcttttcttacagtaaatgaaataatacgaaatgacctctccagcacgagcacccactcctagttgccacattggagcactcagttcagcaggggtatgctgacttcagcagacaaagacttttgaataaataaactgaactcacacctggtaccactcagaacctccaactgactgaatgccaggagctgaacattaatatgtgcaaagattggctctccaacaagaaggaaagcagggaggaagggagaccactgtgtcacctggaggagaagtcatctcatgacaacagaagggaggtggccgggctgagcacgggagacccaccgtgcaggggcctttcatgggaacggcccacacgcagtttgaccccacgcccagcccttctggcacccctggggttcaatactggaagtgccttatttaaccagaccatcagggcatcatagaattgagcattgaatttgctactgtaggagtatttttaggagcagaaactgcaaacacatttcattgtgaggttttaccctctgtatgaatgaagagaacgctggaaggctgcgagaggactctagtatgagtctccaacatttggaacgtttcctgggctgtcacgtacactcctgctgccttacacagtgcattttagaatcttccagtctgtcatctcagctcttttgtaacatgcttcccttgtctgcgcggttgaaaccgtaggcttgttcatagtcgcatgctcgcatctttgtttttaatctggcttcgaacatagcacaagtaacttgaatagcacatcaataggttactggacaaaagcagaaaaacctgttacaggatagcctgcatttgcatgtgtgtacatatctaggcatctatttatgtataaataataacagagccgacgtgtcctcgcccaggagggcttccctgtcagcaataaccggcatccgttttggaacctgcgtctggggctccagtcgctgctcttgctggcgtccatcgccgcctcggacggccgtgcattttctcgtctcacgcagttcgaggaggaccctagaaagccaggagctgtgattgacagtagctgtaggttaccagacggcaacattagaaagtgattgtaaataacatgcaacctaagtgtaatatatttgttcagttataagatgattgtttcacagaagccttaccactctctgcttcatctaagaaaaccaataccaaaaacgccactttaatgctcagccctgcgttgtgtgttttcagatgagttactgttaacaggtaggtttgtgtaggccttgctgggcactctgtacaattagttgcttattacgtatgattactcacagcgatctattgttccatataaccaaaaagcatggtttattcattgaaacacggttgacctgaactcgtgccttaggaattaatgcccccttatggaacctgcctgaattgcacctgcgggtggaggctccggctgtgaagtcactgaacagaacgtcgctgatggagaaagggctcccgcagaaggaacggcctgtaccgtgcgctccggcacaatcgcgtctcttgtgtctcactcacggaaagaaacaacctgaaggccatcccgtcggtctgcacgtaaccgtgaagacgtgtggccgcgtcccacctgcggctgggtaccctgcacccggcactgtaggagtcacgtgcagcctttctcaggggactgtcattgaaaaggaaacgtttgatgtctgtgtcagctgtctttgtagttaggaaatagatccaataaagccgtatttttttgctggacaggcgtagtctgcgagtggttcatgatacgcgtggaagatgccgctttgttctcagagtgtgttttcagtggcgtgtacttggatcgtctgtgaaatgaacctcgtgttgggaaggctgtgtagacgcggccattcgccgttggaagggcatcttgccagtagagctgttccctttcttctatgtttaggtaaaaacctgccgtagaaatttgcgagacgccggatagttcccaggccctgtaactgaagcagctcagaaatgttcatccgggcgaggtggagaaggaactcctgctagtgccaaatgtttttgctcagaggaatatcctgggtgaggctctggccacacacacagtcacacgccatttgacaatcatctggcgaggaaacgtgtggaaacccacaggttctcaccgtctctccccgcttcttaaagctgctcttccccttttccccaccaaagctccctacttcacgtttgggtgggaaaatattacctggccatgagttaaaatatgaaacttggaacttctacagtaattattgttctcatctttcaggaacatttttcatttaggactttataaaatgcaagaattctgatttcttttgctcagaggtgtacagattgagttaaaggactagggaagtcatcaccacctaaagcgattagtaagcatctatcccccagttttctgcgtttgacaatatctgaagtgagcctgagaacgtcgtcgaaggtcccgcgtggggtggcgtgaggagagcacagaggccggcgtttgggggagctgggaggagacctcacaggcatcaggagccctcggctctccgagtaggggaggtcccgcgtggggtggcgtgaggagagcacagaggccactgttctggggggagccctcagctctcagcaagtaggggagagctggttaagcccttgcttttctccaactggccccagtcggggcctaacagagccttggactgttcaacccggaggcggccagcacgcgcccttcgcttccctctgccgaagcgggcggagctgtccacccagaatgcactggaagctctttcttggtttcaaagtgactttgtgaaacctccttggttgtcctcaaccccagtaacagaatattccaaaattatgaatgtatacagtgatggtttctgcagaagaggttgagcttctgcgaataaccctcttagtgtttgtgccttttaggttgattttgagtaattagaaaaatgcacccacaggctgatttccagccagaggttctgcctgtcggggggaaaagctgttgggcagttacgtgtgccaccctcgtgtacaccagaaccaagactgcgttttcctggaaagctaagagagaggtcagcttcgggaggcagtggaactaccttcctggtctttgctggcctctagcacgcggtcctcggtgaccgaaatcctgggggaaccttagggatggggcgttttctgagactcagccag

SEQ ID NO: 397 - DNA, 320140 bp, Homo sapiens
  source 1..320140: mol_type = genomic DNA
tttcagaatttgaaatcaggcagtttaacttaaggcatgggccttcaattgttcctgtgtattcttcctttgtaactgccatctttctttgatccctaaatatcttttttttttttttttttttttttttttttttttttttttttgagacaaggtcttgctctgtcacccaggcgctggagtgcagcggcaagatcatggctcactgcagcctcaacctcccaggctcaggtgatcctttcacctcagcctcctgagtagctggaaaaacagacatgtaccaccatgcctggctaatttttgtatgttttgtagagatgggagtgtcaccatgttgcccaggctggtcttgaactcctgggctcaagcaatccatccgcctcagcctaaatcttgatctctgccaatagagccaaacgtttttaaaaaggcaaaaatctctctataggtaaaagttttatttcaatgataatattctcaaacatttcttaagaaatgtcttcattttctaagaaatccaattactgtctcatacttccaggattctccaattttttttttccaggatattatagtccatcaatttccatacgactccacacacagtggtggaaaccagggtggtttggggacatgaaagaaacctcagccacaaatcagagttggtcggatcaggcagtcagatctgtctcagcaagtctttggttgggatagtcaaattccaggcatttttatctctattttcaatgaagcttgcattatttttgcttcatttatgcacatcactcagatggatcacaaaaccatttaagctcattccttttcaattagctattattgaactccagctgactccattcagaaatgctgctttcagtgaggctggatttgggacccggtcctcggttttagcccttgtgtatgtctccctgtgaaaagggaacatcacccctgcttgtgttgaaaagtagcactgcttcttggaaacacaagatgctgctccttttcaggcatttgcaggaagaaattgctctcctgcagtattcatgtaaccactaaacccacagccacagggtgtccccggggcttaccttttctgttcagtgtttgatgccctgtggtttttctctcacagagaccacagtccagtcatcatggcacacatcgtcttcaacgtattgctcaaaggcctttctcagagagtgaggtctgcgattctataactgcactttctttttttttttttttactgtcattgtttagaaagcttgggatgactgtatttattaggaactgcaaggaaggattatatagatatacacagatatacggttaaatattgaactgaaatattaactatcccagatgctaataattaaatcagtgctacaaaacccccaaagttaagggccaagatcaatttctgggacactactgacccaacattaatgtaggcagaacagcaaggagacgatgaggagaaaaataaaacatgaggccagagtctgtagcatagctcattttattgtttaaacagtttttgcataggaaatatatccgcttccagtaattgactgcagtatgagcagctgctagcagtataggctggatataacagtaacaatcacattaagtcaagcttgatttacaccagtttaaaacttgtggcaattgagttcatttgcaacccacaaaaagtacccaaagaacgttatcctccaaccgggcacaataaaaccttcactaacattctggcccagtctggggttgatcccagaggcctgaactctagaaattaagtaactgtcgtataatacatcctactgctaaaggtttgttacatggagattgtgcatgtgcctccttttgtaaaaaaatttaattaaaatacaaggttctgtatttatggcccatgaggacaaaatgccaaaagttttaaaatggatcaaccctggtgtgtagctagcaagcaataactgactactcgtcacctacagttgtactaaatgtatctaaagaaacacacagtcctacaaaagttgttctcagagaaatatcattgaggtgggggcagctcttcccaggatgctaaaagttctatatgatataagcacaaattaacagcttgatgaagacataatctactgcagctttgagaaacctatgcctgggatgtagttacccctcacattctacaatgttgtagagattttttttcccaagaaaatgtcatttgaaacatatttacaactgaactcaacagagactgtgaaattgaacaggcactgctcatttgtttgagttttttggtaaacattttgctggttttttttttttgtttgtttctttcttgttttgcatcaacttttatcagtccatgcaacttcaatgccctcgatgaaggatgcataaaaagccatacttcttaaaaaaaaaaaaaagaaaaaaaaagacttccttctgcataaagagatatatttgccacatcagtccctgtagcacagttttcaaaaccattctgtcaaaaatacagtaatacaagactggctttagtgtcactagcttacactgcttttcatgtatttaggccacctgttgttcctggtactgtatcatgcaataagtcatcaagggcttagtctagtgtaccggtaagctagtggcactgaagcgcttttcacaatctcaacatacatttgaattgcaacacacagatatttctagagtattaactagtgaacccttttattattaaaaaaaaaaaaaaactacttacaaccattgaagaaaaaattgcaacaaaaaatgtaaaaattgaccgtctccaacttgtcccctttactattaacaatgtgaccaacagatctgtggcacggacacagtacaaagagttgtcatggcaatgagtttggctgatgcaaaggtcattgtgcagggtcaaagggcaaaatcagtggtccatgttaccccccaactgcagggctccactccacccacacaattttagggaattagaaaaaacaggggaactaccagaaagtgcaaaatatgaagaaggcagctttcagctccttcagcatggagtagaacattcatttttgagcttttactattgaacttgaatagcctgcacattaaaaaaaaaaaaaaaaaaaaagttttctatagaaacccaatttcttaaagtccagaaagcatgcagctggttaatgttaacaaaagaccttgacaggaacatgtaaactatattgaatgtcatgcttggggcctatctgccagcaatattgtagagttgtttcattaaaaatgaatactgtacactgaatatgggataactttctgcagccttcatcatttcacacagtacatagaatttgaatctaggtaaagaacatgtcctgctgtcacaccgctgaagatgtccctgtgcaatctctttcgttgagtccttatgaagctacaagtcacaaatccaagattctgctccctgaggacacgttatgtgagacatagcactgttttagttttctgcctatcctgaatgctctgtgaaacttaaccttaaataccatcacgtaacaatcacaaaaacttttgctaaaggccgtatatactaataaaaagacagtggtgcttcgacattctgaaatgctctggaaaccaacttttccaatactaaatacaacaaaataaccttcataaaatataacttttctccatttacacttttttaaaggattagtatcctatgcttttcaagcacaggaatctgtgaaataactcctaacatggacagattttctttttaatacataacttaagagactggagagttttaactcaagtccagtctctaaacaaggaatattcttgtttactttaaaaatggaaacaacatatagttccattataattgttaaaaagttagctttacaaacatgggaattttaatttaaaaaaaattcttaacaaaactatacagtgtacaaattactgtctacaaggtaggcggttcattaagaagacctttcgctcttctcgctacttgcagcttcacagattcattcacatattttttaatggagctgcccacccgaacattacccgataactatattgctataattaagatttttgccatgtctttatgtacagtctccttcactgccttttatttttttccttagacaagcctcaaatgctcacgtcactccaggggtaacacgcttcagaggcactgtgagtggtgggtggcagggcagcacacaaaggctgaacagtgccacggaactgatggttggagacaccactccctactcatgcccttgggtgaccttcgccatcctgaagctctgcagttctgggtaagggaggggcgtgcaagacctgcaaaagtggggcccttcgtcagaatatacttcctggtacacgaggaggaggccgaaaagttgatttgagattttatatatatagtagtacttttaatagttttatctcaaaaaggaaagaagaaaaaattgatttgaaataaaaaaagcaacacttgaactaggcctttgtattcaagaggcaggcaggaatacccacagtgtgtaacttggttagctagaactgctcactggcaaaaaagagagcgagtctgcctttaaaaaatactgtgtgtcctgtgaggttcatttgttcacctaataggtcaaagatacatgaagagcttggctgagatgatctgtttgctaccagggcgagtatcacagaaatgattggacttacttttgaacttgcactgctaggatcccgctgtgctgttcagcatttgggctatcaaactgaatgggctaatcaaatacaattctccagcccataagcattgttctaaagtattcattattaaatgatatgctgtgagaacaattgacagtttattttattaggccatggcctaggggaagggggccaggggactccttaagacagcctaccatgtgtcaccaattctgaaagattttccttctagtaatgaatacactcaatgggactgggcggtgagggaaaggcaaaataaaaccagcctccattcagcctctagccctcaggggaaacgaaatcaaatatatagttaaggtaccattccttaaaaaaatcccatcagcatctaatgggtttaattcatccacaggaagattaattgcttaaaattctatatttcccttctgctctggttctcagttttaaaaggggagataaaatgaaaacaggatttacttttttgttccttaaaaattgaactttgattttaatctatcagtccaaatacattcaacaatagcaaccctctgttcaatcttctggatattaaaaaaaaatccaagtgcactgccatccatttgaagtagtaagtcacaggtaaatcatatcctatcattaatgaaatgaaatggggacgaaaagtggcagaaaaggaatacgggagactccctccaacaggtctaatgtgttttctaggagaaagaatattcatgtgttaaactctcaaaagtgttaaacatccaacatcccctatgtggacatttcaacaaatatttttgccaaatatgagacaggctcactctccactgtggatctggaactttcaagaaaaactatcaccaagccaagtctgcctttttaagccaagtctgcctccaggagaatttgttgtgtttgcttgttcttactattgtgttgttatgaaaaccagtaatgagttcagcttgcaacccaggtgggaagttagagaggggaacctgtgtaagttgaagtttgtcacagtaggcagaacagtcgctttgcagcccaggcccatctcagggtgcactgcttcacagctacactgcaaagtgttaaaaatcctcccacccaccccagaatatatatatatgtatattaaaaaaaatcccctgtccatctctcagtacacaaaaggacctcatcacactgcaaaaatagcagtacccactttggtcaattaaaacaaacaaacaaacaaaaaagcatacattattttttttttaaatctgtgtacttacctataataaccaatacagctaaaagcactacctacataggcaaaacttggtattgcataattcgtataaatttgaaacccctcccccccaaatattaattggaagatgaaaaacatgaaaggttaatagaaaaaaacaccaaaatactgaaaatattgctggtcgattacaatttttaagcggcaactatacacagccatgatatgctttataaatgtgagataaaggtataactgtctaaaaaatccatgatgtcacacatttttcttcgtctggagtacaaaatattttgtcataaaaatggtaaagatttaaaatgataataaatgcagcaaaacaagtgtagtgatgtcactttgttgtatttttttgtttttttttttttgttttttgttttttagatttcaaggcaaggcacgtaatgtggacattatatcttcgtgcaaattaggattactggaaagagtatttttaattaaaattttaagagacatagaggcaaaatgtgtctgcccatgcacactatggatctgtcaatacaagaaatttgttgaacaaggctaatgtctgaaagcaccatgcaagttttcagcaccctgattacatttgttttctcaagagtgcgtttttatatcctacaccctggcgttcccagtttgtaaactgtaagctttacccttgtgacatggatttgcctgcctctttgtctctataatgcagattttatagaaccttttgtacaccctatgggttcttgatgcaaccagtaattttaaataaataaattctacctccaaggaggctgcagctaaaccaacataagtgctgtgttttcattaattttatttttctcaagcacatgatttgtcttgatttaatgcctttttaatgccctcaaaaactgaggggaaaataaattcgttcaaaattattttaaattctttttaatcccctcaatttagagtccaagggctgaaggacttataatcatgattcccctttagatataaatttataaattgcacttgcctctgttaagtgtttcttttgtggggaaaatattatattaatttttactgttgcatgcagagagaacacttcacctacatagaggcatttcttccatagagcctttgtgttcaaactgtttttttccttttttctttttttcctttttttttcattttttctttttttaagatttcaaactgggttacacactggaaaaggctgggttaagggccgaaatttaataaatctgtactgataactaaaggctacagagatttcatatattttttttaacttttagaaatcagagtgcttataaaatggctggctcatggctctgtcacccagcacctctgacgccgcctcctagccttcgttggtgagataaccaggaatagtgattccatgcgtaaacaacaagaatactaaaccaataaaactagcttatcatgcaaatattaaggcatctagaaagtcagttaaaatatattgtcatagagacagaacatctatttcccagcggacttcatgtaacaaaggctacgttgcaggggctgcgatctaccatcagtgaaatatcatcgaccctttttatgtcattacagtttcaaccttaagggaattagtgattgtaagtgctgcaattgctggtctattatcttctttcttcagtttctttcctttctgcctttgtgttgttttgtccagtcttcctcttttcctttttttttatttaaaaaaaaaatttcttaaactattgttgtgtttctttttccctcagttgcttgtttctgcttgaaggaaaggttctccaattatgttcaaaccgtaattttggacattggccggtaagatgggtgtcctatttgacacttggaaaggaaccaagctagcccaggtaccaggactgttgagaggagagaggcagcagggagggaagaaaaaagaaaaaaatacaatgttaaaatctacaacaatatgagaaatataaattccagatgcatcaaattattgctatccctattttcaaaattacagtctaatatgagataaatgtgccaaattatacatgttacacctatctaaactctatagtctattttttaaatgaaaattaagactaaagtgaggcagaaaaatccagagtaagatatataaacaattattgaattctaaccgattgaggatattctaaaatattttacattaatcaatataaatgcaatatcattcttttttgtacaggaaaaaaaagaaaaagaaaagcagcaatctgttggtaccaatatactttgccagttacattctaatcttattttacctttaattcacaagcaattcagtggtcagatgggtttcaatttcttacctgcctattgggttgaatacaattgaaaagtacggtgaaagatatttcttttctccttacaacaggaaaaaaaactacatgtttaaggtaggcccatgcataacatacaatttgaaatgcccaattatcaaacataccttaatcagagttttttagtaaagaccgaacaaataagaatcatagaaccaaaatggaacacagctttttttgttctctacagaatacccatcgtgaggaaaaacatttacaggaggccacaaaggtctctgcttgcactgattagttctatagctctccagcagttttcttattctaaccctctttaacttacttttagagagagccacagcttttccttccaattcatggttccctacattggcttgcaacagaagcctgagcatttcctgctcctccccatcagtaatgataccacatttgagctgctctgcacttgaggagtttggagtgatagatggcgggttgggggttgggggtgttggaggcagtaaatgataagattccagccttactctcatcagttcaactttcgcctatgctgaattacaggctgttaaaaaaaaaaaaaaaagactggaaaacaattctctaattgctactagcataatctccctttaaaaagtatcatatggaggataaaaaaaatcagatctacatatcatgaaacaactctacagcacacattttgggtacacttaatctaatgtattgcctgttccaacactcaaatccgaatgaatgtcagttaagtaacagctgcataaataatcatgaaccaagaaaacatcaaactgacaattcagtactcatattagtcatggcctagcatggaaacatactttcgaggttttaaatttcactgaacatcctttgctttacttttgaaaccatgaagtgagatagcactattgttgtagctatcaatctagatatgctcatttgttcatatttgaattccaaaagtacaaaaacctttacagaatatcaacctaaaggaacaattctgaattttttttaaaacttgatacatactgtttttactctggtgatacctcgatacaaaatgttgcttgttgctacacatacatatttctgagttaacatttcaaaacaatatcacaacgaccatttgtgctcaagggattttataattagactacaaactcaatgacagcaaagtccgtctctagtaaagtacctagcacatggaagatgctcaatacctttttagacaaacaaatcaattaattgtttcaaatcacacccagctatatattttcaaaagctgtcacccaagattacatatactcatgaatatgttgtgatttgatcccctataaaaagaaaataggtatctctgaatttaaaattagatctacttagcattaacaaaaattgattaagcaggaataatcacattcaaactaaaaagacacgtcctcaaaatctgatgaaaaatcgtaactcttaagaatacttgttattgaaacttttactaagcagcttaactgttttcacatatttatcttcccacacacatcttcaacaattatttttgtgctttgcaccattgattgggaacaatgttacataatgaatcatgaaacttattttaccctcaactgtgtttccactgcactttgtacatggtcctgttacagcatttattacttcataaatatctctatctgggattatcttactaactgaaaggtgaacttcacagagaaaacgacctagtcacatctatctttatagagtctgagcatagctggtgctatttcttaacaaataaaataaattacaaaaatggttatacattatttttaacttgaagtaagaagcatgtaccaaaagcaaaaggactaggtaaagcagataatccttgacagtaaaatacaatgtcaacaagcagcaaattgctttgcaaaattaacaagagtgccaaattaagtgagctcaagaaagtcatttggagattgcatgctttagggatataaagtatattttaatgattgaaaatagatgtggctccttacatggacaagtctaccaactaatggcagaaaactcagggtttattttgcaatagctctcttactcagttctttagaagagacatatgtcattattctttggaaaatgttcaataaaaataaattgatgctagtaactaacaggactcttgctgcagaatgcctaccaaatttaatttaaatgtttatttaaatctttcaaaccgcccatcctacattatgaccatatcaaaattgcagagtgcaatatatttgtcaatactgtttatgaacctttgggggaaaataaatctcaaacattaacactatgcagaccccatatatgagttttacaagtctcttattgccaatttaagttcagaactataaggcacagacattttttagagctatttttggtagtcctgttaaaaaaaaaaacttgataaaactaattcaatgactgagataacaatgtaaataaatatatttaattaaagtaatacagattatttaatttcaaaaatgcaatgtctaaaattgcatacttactcaggtaaaaatgtaatagtgctttttatacatctaactctatataaaaatcaataatcacatgtatggataaaataaacacacaaaaacaaattagttacatgtaaaatgcttaatagttttaattcatagtgagaattactatatggataatcttatgttcattccaactatctgcattccaataaaagaaatgagaatataactgaaaggatttcaaaatattcaagctcaaattcagctacttcagcaatatatctttataagtgtgcatttcctttgttttaatcaaatttttcattaccaaatcacatttgtttaggcaaagagaagatgagcatagctgaaagttgaaagcacatctttagaaaatataaagtagatataaccatttaaaaaagaaaagatataattactttgcaaaaaaatcaagcagaaaaaaacacaaaagaatttgatagtaccttaacacaaagtacagctcatcctaatgactattactatgcatataatgagatagttcattataaaatgaatacataagagctaaatcaaaattccaaaaataaaatgtttgatatcatggatactattttcttgctattttgaccaaatgtatgacatggctccccccaaaagggaagaagcaaatgaattatttagagcttaagatgcattactggtgatggtcctgcttcattttgttattggtaagactacctctgaagtactgtatttcttctaggtagcactgtggaagaaaacctaactttatggcatttacttattgaaaaactcaccaaattatgtcattgcagaacagctaagggtagacagggaagatatagcagttgatgtggaaaggaatgtagaccgcttaagcatgcttcaggttgtagcaacagcacaaaggcaaaacttccagacgatagccatgctgaggacttaactataagcatggtaccatctttggtgttttacatatgctacaccacttaattttctcagtgagctcatgagatggccatcagtatctctgtttcacatatgaggaaactgaggcaagttaagttccttgcccaaagtctcccacttagccctcagttatgactcagatctgtctgatttccctggccatttcactatattatattgcctacacaggaagtcagatgacttaacataagaaagaacttttgaacagagtggtctgaaggcaaaattaattggcttcaggagacagtgaacttttcatgcaccatacaagctggattataacctagctaatgttgcgaaagagactagtgcacagaatatgtagctggtctaagtggtcaaatgatctgaaattctatgtattcatctcctctgaaacaaatctagttgaagttctactagggtgagttctacagcgtgaggattaaggcggaagaagatacccacttcttccttttaaaaagatgcactatttctatatgtcttatcctggataaactgggcaaaatagttcatcttcgcatctacctacaaagagtaaagagctatacctttcagtgaaagaaaggcagaaattgctctcggcagccataccaacattttctggttatgtttttttaaaattatgcattatgggagtgtgtcttctaggccaaaaagaattgggcccttaccttttagctcactaacacctaggaaccacagggtgccacattaaacatgtatgaagccattacattgagccagaaaccaaacaaagtcaaagactttacatcacctattatttatttggaggtgatgaaacaataagagctattttaagaatggcaaaaatcatttattactagcctgtgtgtatttgataatggatgagataacacactagttaaacagtttatgaaatgtctaagtatccagtatacgaatatttttcaggggaacaatagtattgtccatttagaatttatatactggtttaatcatgagaaaataccatatttacttaaaagatagtaaatactctttcaagaagcttaaaaaatattacaggaaaaaagcacaaagagttgtacatattaatacatacctcaactgtaacagtagccacattatttacagatggcaataaaaatgagcaatggcccagaaagcatggggaataaataaaataagtattttaatttaaaagaagcatttgcctttagttcctttgcaacatttcctgatctccccaagatggaaaggtttttacttccttggctaaacactctaattttattggcaaaatattaacacacaagtattagcatttcttgtaaaatgcacaataaacagttctccttattaattgctgaaaacctgttgggaaaactgtgctgccctgggttgtacatgggtgcattcggactggttgcttacttcaatataacacaaaggctgcagattacgtcttgtgaaaaaaatgctcgctcagaccagtagaaggaacaaacacttaagttgaatctatttatgtattagaacaaagaaaatagtacttgataaatataccagttgctagcacttatataatgtgtattatttgccaggtactgttctacatgcttgacctaccttaaaacttttaatcctcataacaaatctatgagaaagaccattattatcctgattttacagatgaggaaactgaagcgaggaagttaagtgtcttgcccaactcgtattgctattaaattgtagaaggcaggatttgaattcgagcaatgtcattctaggatctgtatttctacccactaaacttttctcatctccccttcctgtgaagcatagtttacttttctcactggactagaagttatattatcactgaattatgcaagagactttgtgaattgaggttcatatcacaatgaaattcctgtggaagtataattcttgagcccaaaattcagcacaaataactgtgctttattcctccaattccagttgcttttcagctgaatgcagtatttgcttttgtcttacatatgtgcagatgtggctgtatgtcaataatttgtttgttgagttccacttcagatgaggctagcctggaagtgaaatacacaaagtgttttatacaggtcttgggtttcttcgatttattttcaccgtttttagggatcattattgccgtcggaatgatcctctttgcatgcaagatgattcctaatgattattactatttgtaataatctgtatcagaaagctccctggctagctcttacctgaactgcaaagtactcttgtgggctctctgggaaacaccaaatatcataaactgcaggtggctcatggaattattctaactgcaagcaataggacttcacagtaatgaaagagaaacatatttgtttcttaactaagtaggtaaatagccttctttattgctactccttggggaccaacggttttgaaaatagcatatcaaaatggtagcccatcaaacctcattaatttatattcaattgattcagaagttttttgttcttagggcacagtggattgaatgttaactttaccatgcgtgagtgctagcactttctaagtaaaataatagcatctaccattgaaatattttatctaataaagagcacagggcaagaaaaagccactccatatgggagcactgccactaaatattaaatgtgttccttataattactgcactcgtttagtaaaaaactcttacataatacttgaagccttcgatatagcaacctacacttaaataaaaacttccttaaaatgttcggtttaaacataaataagaaaaaagctcttcctcaattggccaaattaaggacttataaaaaaattgtttgatctttttcaaattttagaactgaaaatgaaagatgaaaaattattatgaagatgactaattataaataaattacagtacacacatgcatacatatataagaactcaggtagctgtgggaggttttagccaattaaaaattatacaattatcaggctcagagcaattattttatctcctcccacagaccacagcacagtggagaagcccacatgttgatttccagcctctttctgtctgtattcctctctaccctgggcttcttttcaatgctattgttaaaagtggtactgctcctcttatttgcatatgtgatgctttaacagcagataaaattctctacaaaaatggtgcttcaaaatagtgcctttcactagagaaaatcacccaaggcatactaaatcaaatagaaatataagttttatacaaagcaaaaagagattcttttataaatgattttcagttaaaagcaaaaatcagcattatttgcacaattttacctcttaaaggtgaaacttacttgtatcagaatgctgaagcataaaattacaaatgattaaagaactgaacacattttaatatcatgcttgctactctgttcacaagggcaaaagatcttacatgggcaaaagatcttcctgtgtgtgaaacaaagtgagcaagagagaataattgtaactttctgcaatttcagaatattcaaaattcgtgttcttcaattacttgaccttaagattttgccatttcttttatcatttattatgtttattatgatatttattcattcatagtctttgttatttaagtaaatatgactaaaaaaatcatcatatccctactaacagcactagcaaaaatgagaaccaaaaaggtaagctaataaatggtgcactggctgtcgagggaactgatttcttacggacgaactacatctgtaaatatggcactttacataaaacatattcaaataaagtaggggtttaatatacttcctttcactacaaagggttaatcagcaaggtttacatttgggaattttcagaatcacgctcctccctctccagtagcgctgccaaaaatcatcgacaggaaacgtaagattaagtttgtcctacctaagcgaacaaagagtgctctgaacaggccaccggtttactgcagagcgggaacttttctaatcctgctggaatctgcagtcctgctcagaaaatatcacggaaaaaagttgttttctttcctctaacatcttgtctcaggatcatctcattttggtcacactgcagatcctgctgcttctcccataaaggttaacttaaagctccaaacataatcatgtggaaaatggacattattgattcctatggtccattgttcccccaacctaagtccctgaagttcaagttcaatctggaattacatcatgtctggtttctcctggttaccagacggcttgagacgtgaccacagctacagaaaaaacaaacagccttcttcacgcttcggctcccctatcgattcaaacgtaaactttttttctttctctcaagtacgcttcaagtatggagcatggttaatttagagattaagttccaaattagattatctaatggcatcttaatggattgctgacccatttcctgtgggatggcagcatgcaagtctggctggaatacaattaatttcttaggaagtgttctgaagagtttgcctagataaaaaggaaatgtcgtgttgtacaaatctttctttataaatggagaaagttaggcaaaactacgacaaatcccaacatattattcaaaagccagaccacagatgttgtgcgtccgtgaaaaccatatcaagatcatttttaagaatggtaatgtttttatttttgatttcataacaggtgcaaataattttgatgagaatagagtaattcctttaaaaagaatattcatatacaaagacaaaagtagttagcagcccctttaccaaacaatgatcatgtgaaattttggtttttgcaattctccaccttgaaccaaagattcttccattcatctaccatatcagcatttctatcatagtcccagagtggtgctaggggcccagaatggtgtataaaaagttgaggatttgaacacactttagagctgacagctgaaaaggaaattcagcactcggagaataaagctccccccaggaactccaggaacaacccagctgttgtactgtagttatgtgtcaagataacaaactgagagcaggaaatgctaacctagtgaattcgcggggatgttctaagtgtaatgttgaaataaaagttaactctttatattacctaaggacatactgcccttatcatacgtatgccacatatatgtggagatatacacacacactacatacacacacacatatagatgcatacacacacaaacacatatatgtaatacaaacatatggtttgcaacccattattgaaagttattttttgtttaaatattcattcttttgagagcatacattttacaaagaaaatgttatgaacaaagcaaggaaaatggctgaggtgagtgttatgcaaattaagttacatggataaaatgagagctattacccccccacactttttttttctttctttcttttttcttttttttttttttttttgccctccctctcctgaccaaccagatccaaataacctttactggctgctaaatttctcttgagaaatcaagcaactctctagaattgcagtaataaacgacaatttcttagaaaaacatgtgtaaagtaactacagaatgaagtattcaacccacagaaaggaactgctaacacatgtaacacggaaaatagctgataaaagtctctttggtgccattcaattatggcatccgcagaaacacaaaaatcctcccaattattttagtaaaatcttcatttattcattatttcagaggctgagcaaatggtttgtgtaaacatatcctttggtaacacgcgcatgtttattttagccatctgaagacttcttctatgtttacataagccatcagacacatacaaccactcacttgtggctttgcgttttcttgaaaggggtgaagggagagaagagagaatgaaacaataaattcagtttctcttttgcataaagcactccctctaatgttttaaaatagcttatgtttgtattattcttggattgtccttcagctttctttttcattcaattatattgatctttcatatctgacagtacaggctatattctgactatcactttaagaaagccagccagtcagggagtaactgctgtatatgtttatgtccacataactcacatatgcaacaaggtaatttgtccacatgagacaaagcacaaacacaacagtacctaccttaagcagttcatcacctatcatcctcctaagatcttgagcccattctgactatactagaagtgagcccttcacccaaccaatattttactctgggttaactgcagttcctgacctttcacttaggcagaaaaattgactctctcaaggtgcaagcaactcctttgcacatgtgtgtgcacacacacacagttcacaaaacagttcacaaaattttaaggtcaaaacaacaaaacatcttcagggttgtaacctaataaggctgtgaaaactttcccaaagagtcagctttggttcctaagggaatgcttaagccttggggttgcgggtggatggaggaaatcttccagctttgattatacttgcacagctcccttggcactgccattttcagttccgacaagagctgcatttgacatggaaacacctcaacagggcaattagtataaagcagaaaagagggtgaccatggaaaagtgattgtacaaagaaagtaatgacaacaaacaacaatcaatcaaaataaagcaaaaccaaaacacccgttttgctttgtccttttctacaacagtctccagggattgccttttgttaaaaggcatctaccacaacaaaaataacctgtgatattttatttattccatcgtgacaaaggcaaattatttaattctttggatgaacagacctatatttcttaaatattttcaacttattcagatgattctaaagccatagccatgccctgaagattttagatgtctattatctgccttaaaagtgctagtgttacagacatttatgacttttttcaaaattctttcaatgttttaaaaataaccacaagtcataaactaaaaaagatggataaagctatcatgccaccgacaagggctatttgtattatcaaatatgaactctgttgtgtccatttttgaaaactacaacaaagcaaagcaacctatgtcatttgaatttatttattctgaactgcatcacacctagattttaagaactgtcagcattggattcaccacagcatttagcacagctcaccataaagattcaataatatctgttcaatgtagaaatgtgatggctgccattatcaattatgtgctttctgaatcaggatagaaagagaagaaacaaaccaagatactggctgggcatggtggctcatgcctgtaatctcagtactttgggaggccaaggcgagcagatcacttaagtcaggagttccagaccagcctggccaacatggtgaaatccagtgtgtgctaaaaatacaaaagttagccgggcgtggcagtgcacgcctgtaatcccagctactctggtagctgaggcgttaagaatcacttgaacctgggaagcggaggttgcagtgagacaagatcgtgccactgcactccagcctgggtgaggaagtgagactatctaaaaaataaaaaacaaaaaaacaaaaaaaaccaagataccttttaaagagcttttaggatcattaagaccattctacatgccattacctactaatcaaaagaaaagttacaatttttgagagggaagaaacattttacctaaataaattctgtatttttttctgacttactatgacctgaaactgattaccacatcaatttttcaccaggaaggggatttgtgacagcaacaatactgccctaagaactgagtttaatcatcagattcatttcctccaatacatgtgttctgagatttattgcccactcatcttctctttccatgggctatcaagtttttatttaaaaaattactgtggccgggcgcggtggctcacgcctgtaatcccagcactttgggaggccgaggcgggcagatcacgaggttaggagatcgagaccatcctggctaacacagtgaagccccgtctctactaaaaaatacaaaaaaattagccgggcgtggtggcgggcgcctgtagtcccagctacggagggggctgaggcaggcaggagaatggcgtgaacccgggaggcggagcttgcagtgagccgagattgcgccactgcactccagcctggttgacagagcgagactccgtctcaaaacaaaaacattactaataactaggtaaagttacattttaaatctctaacaacttacaaatatgctttagaggtctatcctatttttagatttagtaagccaatcaatattccacagaattggaagttcgcatagctataggtgcatttacaaacatgagtacacgtcatctggtttgcaattgttataaatatggtaagcttgtacgcagacatgagtcattttgttaactgatagagcatgaaatataagagagttattcaataaaatatggaaatattaggttattaaattcaattaccttttattaaataacatatggaaatattaggtcattaaattcaattaaataaactttaaaatgtatattaattcagaatattttaatgagatactttcacttaattaagactattaatcattaaggctatttggataagatggttacgttgagtttatcttctttttataagcatatattgtattattttcaaaagggaggatgaatacaatcttgttaaaaaaatcacaatatgtaaaaatgtataccttttaaaagtggaggttatatcaatcttcaagaagaaaagtcacatggtagtgaattaataaaaagtcattgtttttaaaaacataatctgaattatttccttaatttttatctgaattaaagtggacatttaattattttgattctttaaaatctactcttcagcagtttctgtgaaccaatatggagataggcagacgatctacaactctatctgagtatgtacctttctatagacactttccgtaaacggaggattaacatcagagcagggttggaaaattatgtcaactctatctggtgaactccttctgggattacctcactctcttctgccaatttttatttcttattacttatgattataccatgaatctaattatttaatttgtcaatttgacacaatttgttcttaaataaaataaataatacataagcgcagctgactttgaaatacttactttctaaaggcaatgcatgaaacagtatcagaactggttttgaaaatgaagttttagaatagttttctcagccaaccaaataaggtcaatcttccatgaatcacatcagtatacaaacagaaattaaaactttaacaaattccttctttagttactgattccaacaatcttcctactccaaaatttatgggtgctgtcaataacagttaaattgactaaccaaaattttttgctattttttttccctacaacaggggaaaaaaatgaacagtgaaatggcttagaattagcagtagaggaaagagttaaaataagaaaaacctacaatgtgaaaaccaatgctttatcctcaggtagctgaaaaatcttcactaaagctgtgatttcacttttcaggtcctaaaatctaaatgtcacattccaccccctcccccaccaaaaacagtataaattgtagaaaacattttatagcatttaaaaattccaatgatcagtaagcatatactatagtcccaacttaatttgacgttccatttacataagaaataaaggaggaggacagggaaagaagaatggcatagccaaaacaactaaatttttaacatatattttctgtaaagctagttaaaaacaaacactatagctcatgtaatttttaggtgtaagtgtagggttggaaataattaaaatgttacctttgccaagtaattcccaatgtatcctcactggtactggggtataaatgcctgccgttttgattcatggtccagtcacaaatcctcagctgtcaattgaaacctagcagtcagatatggatcgagcagtactacagtttttagtatttaaatgaacacatgcaaactagtactgtacatggcattaaccttactttcccaagaggcaacttaaagaaaaaaaaaaagcaaaaaaaaatcttattcttgaaaagcaaaattcctagactcttttttagaaaaagctattgcaatatgcttctctattaattaaagcatacaagagaaacaagtgcttagaacataacaattagccattattagagcacaaattgagctggaatgaaagcaaacgttaatgttcaatagagagatatattttagaaagaaaataaaaatgctttttttctatgcatcacaccaaataatctgcactgaataaaataatcaataactttaagcatgcagtttgcaaaacacagaagacatgcagtttagaggagaaaaggcccaccttacaaacattcgccctaacttgtgtttagaagcatcaaggtcttcagttttaaccttttactaattttgttttgcttaaactggcattgtttagaaagagttgataagcatttctagttttattttaaactcagagtaatggcatttaaaatactttactacatctgaagaaagtgaggaatgcactgaatacaagctgaaacaaattcttcccagatctccgaatcatcagctctgcccttcagagattgttcgagtaaccctatccagctctgcttggttaacagctgccctacagtgctagcagatttattgaaaagatatattgcttatttttattcttaagaaagtaaacttatctgggttggggggggggaaacacagtagaaaatcatcgtttttaaccttcagatggccacactgtaaattaacagcatcttacattgaaaagatgacttcttcacagtaatccactaaaccttgtttgctgcttttcagtgagaatttccagatgatgactggaaccaaagtaccataaattatcataaacttaaaatttatgataaactattttaaacatttctgataatgttgtggccaaagaaataggctattaagaatctttactttcccttttagactatcgagcttctgcacacactaagtaatagtgattcaggagttttagaaagatagtttttgctcatttttctatcgatctatgaggctctaaaaatactagctaaaatttccaaaccacgtgttttagttatttgcatatttcaggatttcaagtaaaagtgattttatgatttaaagaactgaaaaaaattccctgcatatacatagatagatcaacagattgatagacatgtagattctgctcaggatatatgtcataaagaagtcataaatcagtaaataaattagaaagaaaaataaatattctttttttttttttgagacagtctcacttcatcacccaggctggaatgtagtggcaccatctcagttcactgcaaccttcacctcccaagttcaagcaattctcctgcctcagcttcccaagtagctgggattacaggagtgtgccaccatgcctagttaatttttgttagtagagatggggttttgccatgttggccaggctggtctcgaactcctgaccttgagtgatccgcccacctcagcctcctaaagtgctgggattacaggtgtgagccacgggtgcctggtcataaatactcttaaaatggaccaaaatactcacatgaaggaaaaaaaagtacactttgctttgttttaaatcagatgacatactttcaatatttcaaagaagtaaatgtgttcagtctagcgggaagcaatatggcaagatttcttaaaagttctcaaaatgggtcgtctaatcaaatttagtgtgatggggcaaattgtcttctgttttttttttacagttttttttactgtaaaagttttaaaagtacaatgaaaacaatcaaaaaacagttcaagaaacttggctttgtataacaagaatgttaatgatttatcacttactgattctactctagtcaatgaaaatggaagggttttgtttaatttttatttgtttgttttttgagacaggctttccctctgtggcccatgctggagttcactggtacgatcatggttcactgcagcctcaacctccagaaatcaagtgatcctcccacctcactctcctgagtagctggaattacaggttcgtgccaccatgcctggctaattaaaaaaaaaaaaaaattgtagcgataagatcttgctatgttgcccaggctggtgaaaatgctagttttgaatcaaacatttggaagaggggagatgtatatttaggcatagtacatattaattatgttaattattaacttcagattagtatctatggggctctcagcttaggttggagaagttttcagaaaaataatatgctttcacaaagccaggggaatctaaataccactcactgattgcttattgtcccacagacaactgtaggaccacatctcctcagaaggatgtgttgtaaatgagttagtttttttgttgttaatgttgctaatattttgtctgtttgtttgttttacgacccccaaaaatgtcaaatgggctatctttgaccatatgctgcacacataaaaatgaacgtatttttggacttttcttttctaaaagtagtcccaaagtggataaacctgactacagctattcattatcatctatttaagatatatgcaatagaaatattttctcccaaacagaaaaatatgcttaagtacattcaaaataaacaacaaatatatttagcaataatttaatgccaaataaattggcaatatattaattagcattgaatttccttttagttactaaaaatgtaaaatataagaaactaatttatctgtttagattgtgcactaccattacaacatttcttgaactttctgaggagacacgctataacttaagccaggttacttgagcaagagcctctctcttcatgttggtttttttcaattaataaaccttcttggtcataaagcatcttggaactaacaaaactccctgataaagtgaaattttaaagtgatggtatgggtgggggatgcaattaaatcattaaaatagaaatcacttattcaccaaagatttccatgatagtaattcctaagaaaatcaatttctaatcttatttgaccaagatattcctgaccaagcaaattgtgaacagactctatatattaaaaggttaatactacatgtatttaagcttcttttggggtcatgttacatattcttgcctttagcataattcagttttcctaataaaaaataattttacattaggctttaaataagtttaacataataggtgataatcttttttgagtttggggtggtgattccttagtttctgtcctgtgacagaatcagtgttaggtaattcagctgtaaattctctttttttattttaaaactttaattttaagtggcacataaatacatgcctttcatttatatagaatttttctaagttcaaagctttaagaatgctgtaagaatttttccaagtattttttattaagaaataggaaattgcttttttctcccaatagtaatcaaatttaaaataccaagtgccactcagtttagaaattcagtctgttagaattgtctgttttcatgtggaggtggggaacaattcttatttttgtaacaatatagactctcaaaaagaactgatcatatgcatatccttacaaaaatgcacactcatataaatcattttaatcctttaatttatatgcacataccaatatgaaattctattgtctagaaaatgcccagaatttcaaaaccaaataaaaggtgaactaagaaagtaagattatcttccaaaaaagctatcagtaaagggggaaggttggaacagtttaaacaaataagaaagatgtgaaggtgaagttttcactgcatatgttcttagggtggagttctgtggtctctggaaagagaaccttgttcctggcccagttcaaatcagattgcttcaaagaaaaaaagaaaaaggataggggccatctggttcctctcaaatggctacataaaggggaaacacctaagatttggatcattatcctttcctaaactacactcaaataatcatgtaagtagcagatagccataaagaattaatattgcttgtgacttcagactaatagtttgtttattcaaatgggggtcctcctttgttattaacagggtcttttgttaaatacacagcaattagctttgggaacaaaagaaagaaggtaagcaaaatgttctattttgctagactcagcaaacaggctgaggtactaacagttcctacgatgacaacaaatctcaactgaaccaataaaccattaaactgtgaacagaacaatcaacacaggcaaatttaccttctcacttttttttctttttacgtttacaatggccctcaggagaacatcttgaaaggtatgttttatgttttcttgtgtttcttcatttctccagaccctcaatgaaacagatttttaaggggtgaaggctctttttgcggtggaaaacagatgcttaaaaggattaacactccaatattcatactttggattaggagaattttattttattgctaatattaattacctacatggagcaaattaaatggtctctggatgaatagcatgtaacctctgaaggaatggtatgaacaagaaaaatggtcagaataaaattgtgttgtatgtttcacatacaacacatgcaaaaaaaaacaaacaaacaaaaaaaaaagatactcaagatcatcctcatatcttaaaagtcacttctagtgccaatttctgaaacccatgtttcttgatatttaatttaattagcagaagtagaattaacttaaatgagtatgcatagtccatgagcagaataaacattattaaccataaatcataagataagtattagaaaatgaaagattttgtttttaaattagaggctactacaacttgtaaattttaaggtttcaagggactttggagcttatgtagttcaacctcttcattttcctttccaaggtttaaggacttgtccaaggttagaaatgccctgtcacatcaacactaaaacccaaaccttctgactcctaatccctggttctcacccactacaccagttgcctgtcattgttcctttcctaccctgtcccttatgtgcagttcaagaatatttaatgctaaaatatctgtaaataaaaccttcagaattccctctacctccctgattcaactgagatctaagttaatattttcagaaaagaagataattttttccttgtgtttctgttgattaaagttaacgttacataaaatgtaattttacttttacattaattagaacagcttatctggatattagtctttgattcccagtaaaggtaagtgaacaaaccagggaatgacaaaagacagacaatggaaggattttttgaatttaagaactagccaaagagctaaacatttgcatagccattatttcgactgaaacttcctttaaatgtgtttcctttcaagccagcatacatgaaaagtgacctcttatccacttacatacctacccagaagtcatgtgatagcgttttacgtcaagctgtcaattatgataacagacacaataagaacagcccaagtgttgatagcctgcttcctgactgtattgaaaagtttgttcatagtccacttgtgtccttttaattgcttgcctctaataaatgactacctttccaatggtagtaccaagctttggctttgccatttgccaggacaaatattataagaagatttaaactaatatcttagtttaaaaaaatcctacagaagtaatttcttaaaaaggccattttgtgtaacagaaattttcagtgtaatgagaagtactttcaaattctagttttaaaaacaaaagtgttataagaaaagtgttgaaacaatttaaatatacactagaccagtaattgaaattcaaataatagcattatatagtcatgcaagagatgtaacatgctgaagcccaagcaccaataaaatccatgcaactgtgagaagtaatgcaaagacctgaattgatcaggccactgattcattagctcttattataggtaatatatatatagtcaggagattataattttgagattatgaaaataagaccgatttcttataaactagactttacttgactttattgtctcacttagggaaggcaaaagtgagctcctaatttattcagttgaaatctcaaatatacatcaaaggttaatatgtacttcaatggcttgtttgaatggtgaacttttatttctaaacaagaagcttcttagctgcaaactttttatttccaacttacaatgagatttttaaatatatgttgatgtacaatagtaagaatttaggctcttattatgaccttagactcaaatgtaatggtgataatcaaattagccagattctcttgtattaatactaccaaactttctatgatagcaaaggaaagaggcctgaaattagcaactcactatgaggtagaccagataagaaactggtgctaattcaagtaagttgtctcttattattcatccatgctaaaattgttagactgaattataaaataatttctatatttcctaagcaacatccaacactctgattgatagttcccattttctcagggagataaaatttgggaaacgtggttccttcattgcctatcataacgaatttgcacaatgtgttcgtgaattataaagtatgagagagaaaaggatatactgcattttactgaacttctatgaagttaagtcggggcgggggggtgttccacatttctgaaaatgttccaaaccataaaaagacatttctcagcagagactaatcagttcagtttgccaaagcaggacccatgagttcttcaagccaccaaaaccatcttccaatagaaaagttaaagaagaatgaagctccaactgaagttctgattttaagatttcccccatgccaatagcgaatgcaataactaaaccaataatcccaaagacagactagttctagacttgaaaagtattcaagattgtgttaagagataaagaaaaagtctaaagtcaaatactgatcagctggtatgtgctgactattgtgactgattagagaggattatttttaatggcagattatcaactggtttacatgaacctttttgaaatagtctccaggactatgtgaatttattttttagattcaaatgagatatattttcagtgataggtgaactttcttccagtcagaataaactagtattcccaagcagttagcaaccaatgccatcagcaataattattataaaaaggaacacaaagatgtataattactaataacaattgtctgtgtaccaagtaaatgatatgaaagtgtatacttttagtattcagatttgacactatgaatgtattactcttacaggtgaagtacagggttcattttaacattagaaagcttttcatcttaatttgataatgctagtaagcttatgtattagaaaatgaccagattggaaactccactgtagtatcatcttgtggaaagattatttataaaatagtcaaaattacatgaccactttaaatttatcattaactctaatttatgtaggctctattaaagttcttttctaagaaaaacaacactcaaaactacacatcagtacttttcataacctaaaaggataaatctttataaagcagccaccatgaactgaagaatgtacctggtgacgatatttattcttaaaggatcatgtatattaaaggctatagggaatgtttaaaagaaccctctcagactaaagcactgcctttctaattttgaatttctcctagctaatataacatgattgattacctttatttcatgtaccccttgattttccttttcattcatcattgagtgctttaaaccaaatgcatttagaaactgcctctagaagaatggtctcttttaaatctttgtaaagtaatgaaaggacacagtaaatcaatctcatttctactgaaggaaagaataatctttactgaagtcatttaaactatttctgtttctttattcctggatagtaaacataaaacttcatttctataattcttttaaaatttgaaaggctaaaatgaataggcttttgactctagccttagtttactaatatacatctatagcatgatatgcatttatttacaggtattttctgcatgcctcaaaactggagttcattataaaataaagcatatatgggcttcttcaaattaaaaagcagcactaactctttcattacatagaggacaaattatctgtctgcatggtatttaacattttcagctataaagaacttttttttgcttccaaagattaatatatatcatgtatcccataagtattaactatagttgactgaacaaaacgtattcacattgtaagtggtctcgattcaatgttgtccacttaaataagtggctgtcttctttgattttaaaatagtttatagttctagaactcatagtttttaaaatatatcatgtgccagaatgctatctacattaaaattcatattttcatgatgcttgctaagttttcttgatatatttttagatatgtgaaagaagtaattcttatgttaatggactttagtaatcataattacatgaggcttcgacatttatcataagggataagaaaattaaagctgccataggttagggtagtggaggaggaaggctgcctccaaatacatggaattggtcagagtattctaactagcatttggggctaaaggtttaaataatggaggcatgttttatgcattaaaaattaactggaaattagagatgtgtcataaagaataatgcaaatcccatgagaaaaatattcctgagaatatgtgtaatgatttttaaaagaacaagtttctaaacttatacatcctgcatatgttttttaaaaaacacaatggacacatacatctgtcaaatagaaccatattctagtaattataactcatttcgtgttataacaattttagaggtgaaaaaaaagcaacattccagagaattatgttgagaagccaatggctggcaaaaccactaattattattatttggtattttcataactgtgtacagatgttttcagttagttctcactcttttggtttgttttgttttgctttttttaaacctggcaaaacatcaagtattctgaataagctatcatctttatgattttctctgagctctgcatgtggtgacctctaatatgcagtctgcccccttgggctgcaactggaaaggacttgagaactccacaccaagcacagttgaggtaggtcacaacaagggtatgtgaggtgaacagatcaagaatgaagtaagtgggcaaaagtatcttactacctacacaaaaagtcatatatatgcacaggcaacttataaataaagagcgagttagttaacaccagctctttattatttattatagcctaattttcccctatgtaatattttgcatactgttaatttcaaactgctctgctatcaaaacttgagagcagcaaacatatgcatcataaaatatatttaaattcggaactgtttagaattacgtctcttatcctgtaactagaatcgtgggatttctacattggtatggtccatgcttttgactgtggctgatctgtttataagccaccattaatcctggctgtatgttttcacagtttgggtaaacacttcatttgcattaaatttacagcattaatgagatgtgaaatttaaaatgctactagaaacataaatgatgtaagaaagcagaaccaaaaaaaagtgttttatcacatctgaaatcagtaaaccaatttaaagctattaaaataataggaatgaagtgtcgcctgagattttaacttcgtaactcatcgtcttggactaaaatacaaatgtgaggagcaaaacatctggaaaataagaaatcactcaaaaactcgaattatatactgcttctattctagttggctttaaaacagtttgcagtttttgtctttgaaagctatagtctgtaagttctcaatagccaatgagactgagaaaaatacactttggctgaaacactattactcatggatgttatcaatatatgctacagagatggaaaaggtcatgagccaatttgagaaactctactcaaagaggtgagaaacaaaggatcaatgagaaaaaattctgggaaatgaaatgatcagttttggtctcagaagccccgggagcccccttctgagtccggatctgagaggcaacatggagaagcacggaagcgaaagcgtggctacaccgtcacacctgggtgaaacttgcccacctgttgctgatgtaggaaggatgggtctcttgggcttagtcccacatatcgattggcttgagatgtgcctgaggctgtgtaggctgattaaggaagaacaaaaacaaagataaaaattgtgaactatcagaacgaacaccctgtccatgtataagaaacccagagaagtgggatttgcaaccaaaaaaaaaaagtgtcttcatttctcttctcttttgtctgagtgaacaccaagtgatagaaaagaaataataattgacttcaaatcaactagtttattccccctaaaaaatctatccagtaaagcagatctcatacttcagtgtgggtgtctcacacttacatgctctagtaactgtcctgtggaggtactaaggattggataaatagaagggccctgttcctagacgtactttttcaccagatagtagttgtctaatataaaataatcaatgatggtatatgattctaaatgtaaagcagactgaaagtccgccaggaaaaagtgacagcttttaatgatggaatttaagcagatgttcttaatgatatgggatggaaaatgtctttcttaaaagttttgctaaaaaggaaatcaaatcttactatcatgaaggagaagcctgtatcatgtagaatgaatcagctcggtattttacctgtgaaaatggcctcaagtctgataggaatgtttttgaaaaaaagtacttcccataagcacacatacaaaaatcaattacttgtaactgatccaggaagaaagctgatgcacctttaaatagttggccactaggtagtaagtatatatggtgactattccttacattgttatagtctcatttgcaagtactttttgtacaactgctttttgctttttggtatagagtaaatttttcacacacacaaaaaaaaaatgaatagggagctactcctaaagacttttgttacttttcacaaggaaaggactgaggtatcttcccagaactaggcaatcccactgctccatattaccatatattacctttattgttctgaagaaagctacactgtttggtttaaaaccaccagattaatgaggaatccaggcttcattttaaatgaactggctttctaaaaccaatatattaattctgccttgttcacttaaaggactgcagaatttgatccatggaagcttttttaggtcaactttttaaaaacagtgaagatgctcacaattcatattttaattgctcctgaataaggggacatgcaaggcagccatcagcaaccagtgacccctactcaatctccaagcctctggaattcaccacacctcacagacagccggagatgagcctcacccttacagaagagcaccaaatctatgctgctttttcttttcaactatgagaaagagccttccttggcttctgtgttttctttgaccatagtactatatcaattcaatgaccagttttttattactggtggtgcctaagaagctggagctacaagcttgtttataggaaagaaaaactactcactatgtttcttttatgtaggagtggaaaatggactgatgcagccatctttatacaaccaagatactccttttgaatattttgtaattttactagtcaaatcagatccctttttgaacaacctgtatgtaagtataaaaacaattcattaacaaacaggctgagggtactcctataagtgaactgtgatcatttgggtctgatcctctcctgaatctcttctattaataacaccacaagagtaggcatcagagtttctagaacttggttttgaccatttatcctgtgataatctttcaactacttaaaaaaaaatctttgttttctgtgtgcttttatttaaattgctgacattgtttgctcaaagatgtgaagacatccacttttaaaatgagtacttagtgttttggtgactgtaatgcacatagcaaacctctagaacaaaataatttttagtttttcctgagtaggtcgcatccatctgtgcattcagggaagtattctaagcattaagaattactgatgggtattacaagcctataggaacttattaattgacggggctcatgaattttgagaaagaaatgctgaattcactgtacaaagtattgtccatttttcttatagggttccttcctagtctttcagaaaccataaaaaaaaaagagcatctttccaatggctgagaaagaatgagtggtgcatgcctctgattgtctctgattcacatggaaatttcaagatcatggggattttcttgctctaagaaagaaaaaaaaaaggtttgaattgaagatatctgtataattggtgaggtgcatgctaattccaccaattcgatagctttatccattctacttcaccaatttgtacattccagctccagtactaagaagctgacagttgggtgaaaccacctcaaaattaatttcttctatacttctaagtattttacatgaaaaaacaaaggaatgatgcggcttattggtacgtgttaggaaggttcactggctaaatctctgacatttaaatgttatggccacactaaaaagcacagtatttgatgtaccaatgataagcaaaataatcaaaaggttttaaaaaaaaagcttgcagatagtgaaagtacaggtagcttacatgtgcctaatactaagttttgaaatgtcctcatctgttcccaaccttatgcgactgtttttaacaatgacataacctacaatgatgtaaacatgcaattaccttacagaggcactgattccatctgctttgtgaaggggcttgatttctataggaatgctccaataagtaccaattacctaatctctctttgggtgatacgaaaactttgtattctgcgttatgttactcagtgcaatttcaatgtataccttgaacaagcaggcatgacttattatttttgttatagctgttaacttaaacaagtgagcttctcccttttcaaatatgattcactgactggaatttgagaagagagagcctgtgatagcagggccacatccatgcctgctagctccacttaaatgagaaatctccatctggtcaggtagctggaaaaattgccgtgttttccaccttggatcagatatccaatggtgcctctgatggacatttctcatttcctatggaaatacttactggttgctgtaggtgaagctgcctcaccttcagtggatgtagtgatgggtttagtatctgtcatgctcagggtcacaggtcgcactgcactgggatggggagagggtgccaagacaggagtgaaatggccaggcactttccctactacttgaccactgccgttaggctacaaaacaaaaacagaatgccgggtgaagcaatccaaaaggcagtcatcttgttcaacaagtccactcagcacacacgactgtgtggatccagcacactgcgcataggcgccacacaggccctctcgagtcggagtcggagaggccagtcaatggttggtagtaataaggagcagcagcatttcaaagaaggttttcatcttcaaagcacgtcatggtataggtgaattcctctttacagcacccctgagagccaggtagacttgatcctttcatgtagtaggccaagaaactcaagtgcagacttaaatgcttagcccaaaggctaaaatggaattccttactgaactagctacagttggaacccaatgcttccttattctctgctcttcattttctataatgagtcagttttggcttttagaacacaattttcacctacatgatgatatcactgaaacaaaggacacaaaaatatctaggagatcaaatacaacgaattctggaattttcatcatttacagtcaagaaccattctcctgcatacaaaactctagctctcttacacacaggtgtgctgagatgcacacattaggcaatttagattccgagatctatggtcaacttttgatgatttactaatacaagaagatagaataagatgtaaagcatctaaaatttcagaggtcatacaatgatataaaatgctgagctacgtttgtccttacacctacaaataaaagatttccaaagtaaattaaactgtactgaggggaagcagaggacaagcaaatgagcattgttatttgagttactcttacatccatggtggtgcatggagagttacacaaaacatttcttgttgacatttgtgagaattaactgagaaaatcccctgggcaatgatagaaaagatgttactatctgagttttagctcctgggtacaaaaatagtttccgtggtaggaaacaaaatcctaaggatacactctttgaagaaatagtggaatatatttttctagactgagaatgttatttttgattatacccatgttggaattctccactgcacggtgttcatcgcaatttgctgggaggctattctcggcaagtatatagtctttataatctgaactgttaaaggcaaaaaaaaaatgaagcagaatatttttctaaatatctgcacataaattacaagtagacatttatttagagaaaaagatgaacagctaataacacttaaatattgtgacttagagacatgaactaagtcttcggttaggctcctcagaggccacattatttattctataaagaaaatggacttcctgaatatcctgattattcatcatgggtaattttaagtatttaacttgatgtcaggaaaattgaccagagttttccaatatggaaacctatgggagagttacatctttaaactaattttattcaaaatattccattgaatagcatgactgtctcactataattggtgcagcagtaatgcaattaatctcaaaattgctgtggggaggaaaaggcatctcagttgcttatcttaaaaatcaaaatcagtgcagtgctggagaatattgggaagcaacagctgactagaagtgaatggtgaaggaatactgatgtttttccatttctaaagctaaaatggtaaataccaagaattctaatttgaaatgcaaattaattggttttgagttggagttaaaaatcaaagcagatacactgttccttaaaaaaaaaatctgcagttaactataaagacccatttttcctttcaaagggaaaaagtagtttgtttctacagcaggccatccatttctggttatctgaacactggaaataagtgctttaaatatcttaagaaagaagacaggtctcattttatcattggtggtacattcaatggtaaaaatgtttctacatacagtgttcaccaaaacagtctgaaagtacctacctggaacaaaatgtctggagcagaatgacaataatttcaaggaaatgctgccaccaaatatattatcctaccctgaccattctacaaacttcacctactggaattgaacaacatgaactagtagacacttctctcatttgaaaagaataaaggtgacaaagaaagaattcccaagtcaatgcagacaactttcctaaaactcagggtgagaagaattgagggctattttctcctcagttttctactggttcaaacagatgaagctacactaaaaatttctatcttttaaggctgttaatagatgaactttcatactgtagatagaaaagagagatgtcttgtctgaaggtgaagctaacagcattaggaaaggattattctactttatacacggttcctattatacaaaatcctgagagtttttttgttgctagtttttctttttcttttttttttttttttgagatgagagtaatatgcttccttagaaggtgatatgtatcttgaaaaagtgaagaaaaactgagaacaatataggcagattatcacctaatatgccctcttaacttataaagaaattgaaatatacgtaaaacaagcactgaataattaaagaaatgtgtaacactaagggcctgattttaatttgcataatttttcccctaacagtgcctaattaagacatcagttaaaaaaaaaatccaatggaactctaagattttccacactgaattaacgttaaggacttttaatggatgtcttaattagactttgttattcatggaaattctacacaaattaaaatcagaccttgtgtgcactgttcccagctgagtctagcaaaatgctctatggaactgagacttctgaatccatgagctgacaacaaattttatttctaaacgatatactaagatcccactctcacttagctgtctttagtacttcagtcatgaaaagtgctacaacattttaacattttcttctaaaatacaaataataattttaacttcaaattcaaaattcaatattgagtttaatatctcagtcagtcaaactaaaagtaatgataactttttaagtaacccaaagggtcctggatgcgttgttattctaaattaaaagttcagaaaggaccattttgtttcattttaacaaattaagaccaaagggatttttttctcacctttctttgctaatttaaattgatagacacacactatttactagcatttcaggaatgttccaccgtagtaatgacggaatgtttgtgaaaattctccaaaatattaaaaggtataataagtggacaggagtcttagaggtaaagcagcaaagctaaatatcagatcctaatatcaaaattacattacatgttttagatattacaattattgatagccccaggtctggcacaaagactgtctacttgattgtggaaaatgctcatataccaaattcctatgaagtaacctcttggtagaagaaaccatatgtctaggggagtgagaaatgctcatgagtcactacacttacaaaatgaatccccaaaaccactgcacaatgtttccaaaaaaaagaaagacgcttctagtaatgtcactcattattaaatgtaagtcatgtctctgcaaagaatattcaagtagtcatcaaacactgagaatgtttacattaccaaagcttattttaatacctaatagttggtctataaatacaactgtaagttcttttgtgtgtgtttattttagcacataccttactcctgcctgaaataagcacattgtctctgtgtcaaaccaggtatttaagaggtgtgaactccagcccagagctttcctgtcaatgtactttctgcataaactttcccttcagtcagtgaaaatccaaaaacattaaaccatcttcacaaatgtaccctttggggcaacacacttcctacctgtcattcagccacctttaaataaaaacttattgagtcaccaagcaacttcctgaagatggatttcaaggcttgacgttctgccagacacactgtctgactaacctttgtgtctcagaattagatctgtcccatctcccttaggtgctaatcttattttctctcttatttttacctggctggtttgtggactggatgggtcataagaaggtacatagttcttcagagtatcctgaggattcaggtggggaggatatctgattgttggatgagaaaagtagctcgatggggctggaggaaggatagcttgtgttggaaatggcaacggtgaaggtggaggtggagttcgagttgagatgactgcagaagacagaaaaggaaagattgactcatcagctggttaccttattgctccattctgatcctgaagaatgctgtgaaactacaaaactggtaaccattcatttttgtccccatgatttaaccaagctctcctaaatcaacagttactttttcatttttattctcaacaccagtacggctaactacacagagataaaacatcactctagaaaattaacaatcttgcttcctggctctgtgagtggttacaaaatcagtttctcttttataggttatgtcaatacttgataaaacacttctttgagcaaagatatatcccgttgaaaacatattctttgattataaaatctttaggccgggtgcagtagctcacacctgtaatcccagcactttgggcggctggggcaggtggatcacctgaggtcaggagttcgagaccagcctggctaacatggtgaaaccccatcgctactgaaaatacaaaaaattagctgagcatggtgatgggcacctgtaatcccagctacttgggagcttaaggcaggagaatcacttgaatccagtagacggaggttgcagtgagccgagatggcgccattgcgctccaacctggtgacagaaccccatctcaaacaaacaaacaaacaaaaaacattttgtctcataagccccatctcaaacaaacaaacaaacaaaaaacactttgtctcataagtccagagcaagtcacagcattaagtagagggcaaaagagccaaaaattttctaccaaaattaaaaacaaaagtgaaattcaatttcaaataaaacgtttccctgtacatcctacctggcaattgtttagaaggaaagacaataactaatacaacatcatctcatgtcatttataattgtctggtcatggtataaatgcttatgaacattggaacatagagctagaaactctcctaatgaaaatgtttctttcaaaaccaaaagagctctattctgcaactatttttctttctactttaacttttactatatgtagtttaaaagatattgttaatataaaaccaagaataaaacacacagcaatgaaaatttaagctttcatataggtaagtatattactttacccatatatcacatattttataataattttataaagggaaatactatataaaacacatgcaatgtggacaatgttcaattttactataacttctcaacattagtattcttataatttattgttcagtttttgaaatataaatcttaagtttgaaagatggagaaagagtgtaatcgtatgatcattatctctaaaatgttgagagaaataatcatagaaatacaaattaaaactaccaacaaatatatgtagaagtgaaaagtaaatgtctttctattttaatatttcccaattcaaataataggaaattataaacgataaatgtctaatgttttatgagacaacttaaagaatatgaaaaaaaataaattttagccataacctacaaagggaaatcacctagaatgatttatttccaactttgaaactatgtgggtgggggggtgggacctatttatgggatgtattgcttacctctcccaaaaaaaactttttcagaagatataagaaattaagaatgtatagaatagaaaaaacataaattcaattttatagtcacgactttgttctctgaacgtccagagcactgtttctgaaattctctgtattgttcttacaatgcagatcccttggtctacacacagacctaggggatcaggacctctaggggtaaggcaccaaaatgtatattttaaataagtgtccatgtaatcttcctacatactgaagtttgagcatcctccatcaaatgtatgcatttcagagaacaaatgcgtatttcttaaaacaaaactctttactgaagtattactttatttaagaagtatacccatttgaaagtatcatttaaggaaatacaaacatctaagaaaaactgggcatcttttacttagtgtctaaatgctcttaatctcagctcattttaaccatgatttttgctcacatctgtacacaaaccctggaaagatatatacatagttccatcttgggtcctttagcttttgagattaatttggccttaatagttctggaggagatctattttcaagtgaaattgcagaaatcaaacccgaactcacatctatgggcaacctggcactgtgcttgcatgagctgtaggtggcctgataccactgggtaaaatgtcgtatttcaaactgagagtaaaaatgactaccttttccataaaagccattctagtcctttaaaaataagaaaagcaggccaggcatggtggctcacggctgtaatcccagcactgtgggaggtcagggtgggtggagtggatcacttgaggtcagatgttcgagatcagcctggccaacatggtgaaaccccatctctactaaaaaaaatacaaaaattagctgagcggggtggtgagtgcctgtaatcccagttactcgggaggctgaggcaggagaattgcttgaacctgggaggcagaggttgcagcgagccaagatcacgccactacactccagcctggagtaagaccctgtctcaaaaaaaaaaagaaaagaaaaagaaaaaaaaataagaaaagtaaaatacaagacaaaaagttttcctttattatgaaagaatacatacacatgtatgtgtatttcttgcatacattattgcaaagccttattgtcttctttccttcagtcttgctccttccaaaacatcctttatagtgctatgtgaattactttttaaaaacaccattataatcatgtaacttctccgctaaaattatttcagtggcttcctactgcttccagaataaaatcccaacaggtttttcagtacacacaacctcaggtactctgagaccgagtcctggatcacttctttggcttcatctctggccagacgaagatatttgtggatccttggctatatggcagttgcctgctgcaatggcctctaatgcactgatacatgctgttgcctctgcctcctttgcctgccagtttgccccttttcttcctagtttgcctctctgcctcccagtttgcccctcttcctcttagtttgcccctctgcctcccagtttgcccctctgccttccatgttgcccctcttcctcctagtttgcccctctgcctcccacattgcccctcttcctcctagtatgtccctctgcctcccaggttgcccctcttcttcctagtttgttgttccttcttgtggtgaactttgccatcacactttagctcagaacacatatcttccaggtatctaaaccttcttcaggttatctagtcatgttcagattagatgcccagccaatgacgtggccccactctctccccactatatcctgaactctttaaggacagaaacgatctttctgaacaagatgcctaacacagaccctaatatacagatacagaacaaatatcgggtgaaggaccaaggtggagggctcatctaggtctctcctgtttcgttatataaaaatatactgtctactttttttcacgttagaaataagaatattttcatcaggtgtcgtaacaaatgggtgatttgacttctcagttaattctgtccaaatattcaacattacaaacctatgaaacagttactgattttttcacctatctcaatggtataggtaataaatgcaaaagttcttataccacatttaagttgtatagtcctctctcaatttcgtaattttttaatgatagcaataaaggccatgcatttttttaagtatagcaccaacaaatatcaacatatacttacaaaccaaagctaataaggactttattttaaaagatgttacattgtttgcataaagatttaaaaaccagattcgattagtcagaaggatgaggaagtgcctaactataaatttaaaccaataacagtttcactattaacatatttatatataaaactttttccacctaaaatgcagtctactcctctctaggtaaaaagtacacagtgttaattattagctgtatctcatttttaatttttgaaagatttggtattagctgttggttaaagtacaaatgtcaaatattggattcattttcctacttaaattaagacatcagacacaatatcaagtgtactagcccaaaggatttgggcatataaaacaagtgtcaaaaaaagtaccttttattctctgattactctcatatagataaatattgatttatatgtagaaaataacatctacagaaatagtgccttacgtcttaatgcctttagaaacactctaaactcagcaacataactgaaattccatctttcccttagtaaaatatcaggactaatcctgaagctataatgaagatagctatgtacccatattttccacattcttctgataacaatctttttgattaaggtaattttaaaacacatattataaatattatttacttgtatgactttgaaaatctttcttttttctttttgagatggagtctcactctgtcgcctaggctggagtgcagtggcacgatctcggcttactgcaacctttgcctcccaggctcaagcgattctcctgcctcagcctcctgagtagctgggattacaggctcatgccaccatgccaggctaatttttgtatttttagtagagacggggttccaccatgttggtcaggctagtcttgaacacctgacctcgtgatccacccgcctcagcctcccaaagtgctgggattacaggcgtgagcccctgcacccagagaaatcttttctcataaattgagaagaaaaaatacttgatcggattgtgcccctcaccatatgggttgagaaaatatggttgccatagctctatttataaacttttgctccgtccctaagggggttaggccctacagacaagaaggaggcttctcctctatgcttgaaactcctcaccactgtgtgcaactccaggtattccgggatggtggtgctgggggaaagtgctcagtcttggggaagaatcctgtggagatgcagagctgaacaatggcttttcaggcttcttcatagtagtcggagaagacatatctgcgagaaacagagaaaaacccaaagctccatgactttcttaagctctaaggttcatgtcaacaaatgacagatctcatcttgcaacattttagtattcttatactttggctcttttacaaaatatattctgagtgtcaacgatccagctgtcttggagctctgaaatatttgttcaatctccatggaagctagcagaagccttcattaaaattatcatcagaattattcccattactaaataaatcttaaacttctaaaaacccaaagtcttgtttcctttagccccttggttcacacaaaggccttctttacctcagtatttcattctgagatttatatgattcagaagattgtctttcgacagaggataactgctgcaaatgggaaaaacaaccttcaggtatgttggtcacgatatcactgatttcacagcttttatggaaaactcattcacttgattagcaaaaagtacattccttaatttactccttctgcaaacgtttactgggtttctgtactggccaggtaaaatgaagatgtcaaagaaattaaaagtaattcctgctctagggatgctcactgttggtgaggaggaaaatgattagaagaaaatggttgtgaatggttgagaggtacaatgtgtgttgagagcagggaagttttggcatttgctgctacatcgccagctgcgatgtacaggacagatatcgtctcagtctccccaggatgaggaaggcatttctcattggtgccattttcaaaatgtgaatgaggatgacattctcagagaggaaatactcagaaaaaaagatggcacagaatacacaagtaaacagtgtgtggagtggtgaaagatgaagaagaggagcaagcctcttgcaggtcccacaggatgacgggtctccagcttcctgtacaaacgtctgaatgcttaccctcataggagaaacgccatagatgggcaaaacatgatcacaatgacagtttaaaacaattcccccagaaactaaatggagggcggactggccaaaacagagacagaaatcatgaagaccacttcagaagacagattcatcaatacattcattccataaatacttgttcaagaccgaatgtatgccacatgctgcactagcctgggacacactggtgaactggactcactttcggctcctttaaagcttaaaatctagtgaggcgatgtggacaagtaagaaggaattgcaaaggtgctgtgataggaaaagaattcagagatttcgggcttcattcactcattcatttcataaatatttaatactgccaaaagatagatcatgagagcttgaaataagaatcatgatagaactaatgcaataaatattttaacagggttcacccaattaaattattaagcaatgtagactgtcatcatcttagttgactaagagactataccatgcagtttgttggaataagcagggagttgagagatatgccttggttttaacatcttgagtgctgttgactttaatggaagtttatcaactcatagtaaaatgttataaaaatgatgagctataaaatttgtattttattatgaaaaatgttaactgtattcacaagtagacagaattgtaatgaatcctcacgtaccgataacccaacttcggcaatgatcaactcataacaaatcttatttcatctttatccccatctacactttctctccctgtggtactttgaagcaaatcccagatatcatataactttgcttctaagtagttcagcatgtatctctaaaagaaaataaatctttattaaaagaaaaaaacaccaaaactttatcacacatacaaaatgtacacaatttgcatttttgagttttcttgaaattagaaaaagaccttatggtgctattaatatgagaaactaattatcattacattttaccatttgaaaaattacctaagctctggtaaaggcattcataaaattaaatatgcattttcagcatggtggcatttaaaggatgaatatgctactgtaaaggcagtagacatcacagtctacaaaaaatgccaggcggatttgtagctgtaagctacaatttgtgactaactggctgttgtgaatctatcagaactttgatgagtcagagaaccatttctgtatatctttttcaaaaaaaaaaaaaaaaaccagaaataaattgttcataaaaccacagcaattaatgccactataaaaaaagaaaaaaaatttaaaccatggtttaaaaaatagacaaagctcattttgctatcttcaagatgccaaaaataatacttaatgtcgcataagagctatgtgatttcaaaaggtaatactacaaatataggcctctaactaatggatgtaaaatcatagacatacagattattaagaggtggaaagaacctctattctgtctttcttgttatagatgatgcaatcacttgccattccaaatttttaatttaaaattaactgtttgaaaaagaaactgggaactttttattgatactcttctgctttacctatgtttaaatataaatttcaagtaaaatgtaactgggtaaatcagtttctaaaaattccatagaataaataataaagcataattatacctcattttaaaataatttaggccgggtgcagtggctcacgcctgtaatcccaacactttgggaggctaaggcgggtggatcgcctgaggtgaggagttcgagaccagcctggccaacatggtgaaaccccgtctgtactaaaaatacaaaaattagctgggcgtggtggtgggcacctataatcctagctacttgggaggctgaggcaggagaatcgcttgaaccttggaggcaggggttgtagtgagccaagatagtgtcattgcactccagccgcgacaagaacaaaactctgtctcaaaaaaaaaaaaaaaaaaattaatgtgaccacagcttgagaaacagaacagtgtcgttctgggtatgtcatttctggagaagaggatcaattaaggcaactgcaactactgtaactatatcagacttttcattaaactcaggcaaattcatgggtctccttttgtaaagggcacataaatcaagggtgtttatatagaagttgaagatgattatgtaatttttaatgtaaattatataaattttaagaagcaaagcatttgtattttcttagccaaaatgacacacttgcttttactgagtaattattatgggtccatttattttttcaattcttttttgggcatgcacctaataataacggtacgttcatagaggattatacagaccaacacagaagaaacagaatacaatttgctgttcaagttgcaaaaggaaccacaaactctttccttaaacaacaaaagtaacttataatagtaaacataagaatgggaaggttcactgaccaaactgaaaggatttgctttagagacaggtgaagaacggtagtatcagaatataggtttaattgcctttgttttctcattaaatgaaattaattcttggcccattaataaaaatacactgctacacagcatgcagaaggcactatgctaagaacttaggaagatacaaaagtgaatccccgctcaaaaaaaaaaaaaagacaaaaaaacaaaaaaaaaacaccctctctagactagaaggggaaataaaagatcaattatctggggaaaaagtaaagatagagtttctagctattacattttaatcatgaaccaaactagtgttattttaattttaatttattttgaatgtctacagtctaaaaggcttcatgccaaggtgaaaaatgatattgtttctatgtgtaatgtgctcatatgctacaaaaaaaagtttgaagaatgaatatatagaaaagatactttaaagtgacctttctgtgaagaaaaacaaataccacgctttacacaatctactgtccctcaagcaggaagaatactacataaaaagattaagttgaaaataagttgaataataataaagttgaataatgcataaatatataataacttgaataatgcatacataataatgcataagttgaataatacataaaataaagcagctgaaaagagatgcaaaatgataggcaaaggattagctgatgtttctactggtgggagggaggcaggagttgctggtagttgaagagaaacaagtagaggccagtgatggcttaaaatcagacagaacaatttaaatttgatttagaaagtaataatttataaatgaattgattttagaagaaaaaactttccaaaaatttgactttttttttctgttctcaccgcccttttcacttgtacctggctgaaccaaaaattttcttcctagtctcctccaggccttcctctccatggcactttataaaaaccagcagctggcatcgtatccttcaaacagtatctttctcattgcaagatctaccacagtatcacatttttaaatagctctttttctttgttattccattttgtttaaacttcagtgaagctaattttcttatggcttccattaggagcaggagaaatatgtttttaactctgtgccatccctgatctatgacattcccttgaactagaaaatgaggcatttccactctccttattccacgcatagaacaatgttttatccactgaacaaacttgttttctccttaagtaatctctcttggaaatccctgagatctagatttcattaatgatcttttgtttgtatcttatattgcttgatgaatttttcattgttatttacttgtatccactgcgtatgctttttttaaaaaggtgactaatggcttacctcctaaggaacatgcttttaccaaaaacacaaaaagatgtagaggctggaagaatatgctacttgggaagagaatgaaaaaaaaaagtagaaatgaaagaaagaagaggtaaagcaggcaccgtgtctaggcagcttattttagaatctctggcatgtgaaagaaactgtattatgaagtgatgactagtagtgcaggatgagaaaaataaccatagccagtatatcttaaaattcatgttccatgaataaatatcaccagatgagaagtagctgactgtaaagcaaagagaaaagaaaatcaatcactgagattctagtaagtgtgaggaactatggctatgcatcaagatgccaaacaaaaccacgtggtccctgtcttggtgatgctcatggtttagtagagagggcagaaattaaagacagaaatgcattaaatagttgcaatcataataatactggattgcagaaagaattcttcttaatgacagattagagagaataatttttttaaaaagattcacattgatggtgttattcttcaatgtgtacacccatgtttacatttataactggaaaattagctatgactttagaaactcatcgtgtagttgaatatggaataaaagatcaccatgtaagaaaaaagttcaagtaggctactgataaagttggttcatttattcttaagcatccctttaaataagtattttgcaaaatcaaattatcacacgatttttcctgaccatactatatatatttttggcactgtaacatatatacatcctaggccttgatgtgttatttatttcacgtcatcacttcaaagagataaggacttaagcaaataaagagttagatcaactcatctcccaacaaggtaatttcatctacaaaggaagagagtcgctgtgaaacacagcgtatgtactcgactcatcggcagcttgcacaaattgcgctccagatgtatatctgttcaagtcagcccaaggcaacaattttgatcaattctaatgtgataaaatgctgcagggaaagtgtgcagaaacgtgtttacgtcagcccttaattaaactgttgttcacttccaaagaaccttaggaaacactaatgagacatgagttttggcaatttcttcatcaaagcaaagaccccttcctcagtctgtagcagcctgtcatccaagtcgctcccgggataaatgtcacatggcactccaatcagttagccacctgttagtagaacttcattgaagtcaactagtgatctagggcaagctcaaacagcaccttaacacctgcctgtctgggacacctgctcctttttcacatatagtagagcaatatgttagcttttccaatatgctcgagtagattaaggttacaaatcagactactaaagcctacatagaaaacatacaattttcttttttgaaaaattccttttcttccctatagtaacacaatttttaacaatttcaaattaattatgtaagaacacgcaagaattcttgaatttctggaagctattattttcagcaaaccatatcactaaattaaaatgtattaaccatgccagtcctatgatttagtcctttttctaggatagaatagtcctatttctatctggttaacaaagaagtaaattccttcaaaatgttttaaaagtgtaattattttacatattcctaaattgtcttccttatttacatgccatacttgtaacttgtaaacaagtctaaatgaaccctatagagacaagtcaccatttgctggctacttttattctccagtatttaacgttaaggtttgttttattgctaagtgcttataaagctataatcattgttaaaatatctacatattttctttatttttcacattatcaagctgctaaacaatttacaggattcctctttttcctttctatcttttattattgtgtaaatttcatttatttatttaaatttatttaattattttagagacaaggtctcactctgttgcccaggctgcagtggcacaatcatggctcactgcagcctcaaactcctgggttcaagcgatcctcccatctcagcctcccaagtagctaggactatgggcacacgatcacacccagctaatttgtaaatttttagtagggacaaagtctggctatattgcccaggctggtctggaactcctagtctcacgagatctcctgccttggcctttgaaagtgttgagattataggcttgattcattgcatacggtcttcttttttcctttcttcctttttttcttcatcttctttttttgttattttttggcagaagaaaactcaaagtgtaatgaaaacagttgcaaaacttctgttaactttgaccctctggtatgatactgaccagaggagtttgatacagaccagagaaggaaagaacatacataagcacacttagcttagagacagtccaatggctgggatttgacaagattatattatattgacaagttttatcaagttgatacaccctcataattttcaaagttcttcattttttggacttttgaaagtattagactttcatagattttttttaaaagagttttctagataaacaaaaactctgaatattgaaaacctcttcagagaccaaattcattgctgggtgaaggcaaaggtggtcaacacatccatcactccattgaaactctgtcaagcaacacagcactgaaagagaaaaatgagctttagcttaactgggatatttctgctttccattaaaatgttgggtggaagctggaagacaacaggaaaaagaaaagaaccatctgtataagataataatgttatttaaaataaataaggtagtaaatgacaggctaccaaatcaagtgtgtgggatgagttttgtagctgaaatctgacatttttacttcaggccacaaatccagagtcagtcctgagacaaggaaacagtttgggctctgttcccagaggacaaggagaaggcagagaagatgactgccaactgaaagctaaaaagaccacaatttctctgcctctgtttttgccctgggataaacagtgttgaagagaggaaagtgtccaggttatttataagtgtatgagtgttatgtagaataagacaactattaaggccagattggggcagcatctagcctgccagatacttaagatcccagtccaaagctttgaggtatttatttctaaggatctccatgtagagaatgacagcaatccttactttaacaggttttacctaataaataaaggactgatgatgggtgagggtgtgtgtcctgaaggaggaagaaaggagagagagaccaagcaggctctgcctttacttgaaagctttgtacaatcctttgtacaataccctctcaatttctccattttcttcacaaatggagctatcctggctcatggggagaagacacatggtgtgttccttgatggtttaaataaaattcaaatgataaaaaagaggtgcatgggtaaagtcacagggccataaagaatgttctataaatttctgtcagaggacatgctttgaaattgcttatagagccatgtgctacattgaaattattacggcttataacaatggagttaagccactcaggcactgctctagggaatgtaaattgataagatctatgccaatatttaccaaaagccttagaaatggacataagatttaacttagtaattctacagtaggaatgtatttattcccgtagcaaaatttcactgaacttctacttggtgacttcatgccaggcagtatgctagggacttgggacagtgaaaagaactagacaagaatcacccaatcagattaggcacagagttacatgcagtgatgttcactgtatctctctttataatacaaaaactccaaaactatctaaatattcatcagcaaagtagatatttaaaattctatggtgtagccaaagtgtggcatattatgtactcattacaaagtggaaggctggatggggtggctcatgcctgtaatcccagcactttgggaggccgaggcgggtggatcaagtcacctgaggtcaggagttcgagaccagcctggccaacatggcgaatccccatctctactaaaactacaaaaattagctggccatggtggcgtgcatctgtaataccagctactggggaggttagggcaggaagagttgcttgaaccagggaggtggaggtggcagtgagccaagatcacgccactgctctccagcctgggtgacagggcgagactctgtctcaaaaaaaaaaaaaaaaaaaaaaaggaaattgaaggatatggtaaaatgccattagattataaagacaaaaaaacttacaaaatagcatatatcatataagctcaatttactgcaaaaatacattcatagaaatagaacgcaccgaaatgcagaaaaatacatagaaaaacaggctagcatatatacaatgaaatactaacagaagttatctttatgtgatgagattacaggtgatttttattttcttcttcatatttgaaagtttgttttttcaaattccccacaaataactattacttttactgtaaaaactgtaaaatagatatttttgggaaaattgttgcctgtagctccacagaatactataaataattcccaaagctgggctgacaatattgaatcctgttaggtgtcccacattacactgcaagaaggaaagcttcatattagtttaggtactggatattgcaaaactgtaaaatgaaatgcttcaatgtaacatttgcaatttagttggctacaggcaaaacaatgtcttttgaaaatacagtgaagaaaaaagaatatctaaatatctgtgtctaaggactcctctagatgtaaaattttatgattgtgtggcaaatgtgaacaagtccttcccacacactccaagttaacaaaaagctctgaatgttatgacaagacatatggatgtaatcccactacagtagtttgatgatgatgccagatgattcaaaaaataattagctgccatgttaagaaagtatctccttatatatatatatttacatttatcacactctaaaataacactggaaaaaatggcaagctacgttaagaggagataagatgtcatcttcaattagatttctcaaccattttttttaaatttatgaaatcagttccttttcaaatgagaaagtatggtggtctttgtgttaaataaatgaaattcttactttaattactgagttatttaatcttaattacacttgagcatattattgtattcctcagtaaagtaaaatcttttctaatagtttaagtctctcttgccatatattttagcccaagcacggttaagtagcatgttcctacaagtctcaattttatcacttcgctataaaaaaggtctcgaggctacacctacacccaataccaagttaaagcaaacctctttgaagctcacaaatgtcttccagagacacttaaaaaaatcctttgaataatgaagaacagtgctaaaacagtgaatatggaataaatgaaaactactttttaaaaacacttcaaaatgcttttgtccactaagcaatttcattttaacagacagacaatgataaagggtcttgagtaatgtgtgtaaacctaatttgaaagagagaaaaaacatcaaacaattatgcaggacttggagcatattttcgtcacttattaaacactggcataggtaaatagctgctattcaccatgcctctcgggaaaacctcttggctatggagtcttattaatgttaagcatctgagagccatgggctataaaataaaatcaataccataaccttaactgtaaaagtcagaaagatactggaagggctctaatttaacaagattacagatgagttttcagaggagaacatttggggaaaagccatacatttaaaaacatttatgctacaagacatctcaaggtttttgttgttactaatgctgttattatccacgctggtaatggttagagttgatttaactgatgtgttactttagtggatttacaggaaagtcctataaatgatctggaacttacttcaaataaaatcattacactgaggtagtaaactaattgcttgagaacaattatgatttgatgtgatttagtgtggtagaaaaagaattacaaaaattttaaggtcatcagttcagcagctcaatgcaaatatgattactctgcacaatattctgttgctcttaatggaaaagtagtcaaaattggtataaattgtagtgtttaagttcaacctaaatctatattttttttctccaacaaatgtaaatgaagaaaaaaagaacattctgtcaatgaaattactatgatggcatatttattatcctaatggttttagaaatcatgtgaaattcatcagtaacaaaacctctatttagtaatggaccaattacatttgtgagataatgtcaatgaaaccgaatattgtcacaggataatggtctcccattgctacatccctagtcatttagagaaaataaatgttgctgtctggctgagtcatttgttttcaaagtaggagacactgattccataacaaggttctgttataataactcaatctctatcaatcatttgttgcaccagaatggtgcaggacaggacatgcatttgtgagaactgcgcattcctcaggtataaagcaaaatatacggggcctccaagcacataagcagcccaattattgttattcaatgagagtgtttaaaatgaacattcaaaaaataatttaagaaacagaaaactttctgaattttccaaaagatccatgttaatgacggctttggaaagactcaagtactgaagatcttcaaattcttggactccaatagattcaaaatctaaaatattagaacacaaatcttagtatacaactttgttattttacagatgggaaaactcaagagttactgaagttaagtgatttgtctaagaccacaccagtatttagagtttcctaatcacaattacagtgcactaggcttaaggcaaaaagactagaacagaactaaaagaaaacatatgtatgataataaatatatactttatttttatattttgacaaatatagctcattttaaactggccatatatcacacacttctactaaagacattctagaacttaggattatttattactatcttattaaatggaaaagtgattttaacctgatttcagagcaaggactacatgcatgaatctctaaggagtctacgaacccctgtgaagttatgtgcattcatctgtattgaagtttcatgcattaaaaaaaattgtaacagaggttttataattagtttgcaaaatcataaacataatatctcaatgacttatttgggatacagtattatatagcaataacgagcatgggtttcttcagcaagagagccaggggttcccattctacctctgctacttatgatctgcatgatctatgatgagtttcttaagcatgatcagtttagtaagctgtaaaatggggtttctgtcaggtttaaaagaaaaatagatataaacttagccaagcacctgacagaaaggaagggctcaataaataaatgacaaccacaaatggcaatagaatcttgttttccatgtttcatttacatgtgcttgttgaagacaatttttaaatttacatgctttcttcaataaataaataacacagaaaaaggaggcgaataatcagtgtaggctaaaaagaaggtgaaaatacaaatataatctatggactaaatttgagtcctgattcaaacaagacaacctttgagatattctagggaatttgaacatggattatatgttagattatattaagaaattaatgttatatttgttaaattgataatagtactgtgattatgtaaaaaaaaaaagttcattgttcgaaatattcagatctatttacatgcaaaatgacagatatctgggatttgctttaaaatacttttaaaaactgggagatagtaaatgcaataagactggcaaagtgttaataacagttgaagctgtgtgacagtacagtgaggttcactttacaattctactttcaatattctccaggccaaaagacttcttaaaattgtgcttaaacattcatttcaaacaaactcttccccacatttattcttcaaaagcattcatatcttcagtttattttagttgaaaaaattttaatcctggcactaataataatagttgatttatgtgtgtgtgtgtgtgtgtatgtatatgtaaaattttaccatctcaaaattttgttttgagaattctttcagaaccctgaaaactcacaaatacacctctattttctcattctagttctgttaggtctaacagagtcttccttaagctttccaagaaaagtgtccctctgggaagacttgcgaagcagtgtttaaatctcctaggccatttgtaagtttacatactgattccctaggcaggctgcaggataacagaaaatgaaaaaaatcccttgaacaaagatctaggctctgccattcattagttgggacaggacagcctctctgatccttggactacttagctgtgaaacaggagcttgaattatgtcttactaagggttctaataatttgtgatctgtacctgaaaaatcaatttcttattgtatatgatattgggagtctaataactcaaatgacactggctttccaaactacttcacaataagcttaaacatgaactcaatatgtaaaaagatttgaaataaaaccttttcttatgcagagaaactttgtatggcacactatgacattatctcccatgggtttcccacttccctattttaagctgtgttccatcaagctagaaacccagtattaaatagaaagttgttattttttcaaactaattatctattgtggtttttctgcaaaatgctgtattttcaaatctttaagcctccagagcacagaaatatgagcacgacttttccatattaatcagtaccagcccttctaacatgtatacaagtttaccccatccaaaatgctattcttgattagaacacatgaagggggaacaaacattcactaattaggaggcaatgtggggaattctgatgaaagccttcaccaacaatttattgttttcctttccattttgaagaagatcgtgttgtgatttttcaattacagcagtgtagcagtgtagttgaagaggcattcctcttcagggtggaagcatccttgaagtttgctttccaatgccagggtagtacctagaaattcacttagagttctttacttttgatattttccataataagaagctaaacaaagaaacttaaaaattgggcttgaacatcaaattcaaaccatctcttcttcacattcatccaccaaaagcatttgtagctctctttttttctggttcaaaactttggtatttgaatatttgccatttcatccctgtgatactaactgcaggaatataaggaattgttggtgttctatttggtccccaaagagaactttaaaacttcttccagtatggttactaagctgtctgcactgccattttctaggacttcatttaatgttaatgactcccagatagcagttattcaaccatctatgacagctgcttattcactcagctcccacagctctagagaaatcttgagattatatcatttgtcagactgtggtttggactagagcactgtgttccaaagtttgggcctaggattaatgctccctatggattctttgatagaaataaaaggttctgaagtcacaaacttaataaacatgttcagtcaagagccactcctggatattcacagcacacagtagcatattaaatattctgcatattcatttatgaatgaaaatagttgaaatttttgttacaaaaaaactttgcaaatttagctgaccactcttttgtatgtagcatatcttttcacattcctaaactcacattaggaaatgctggggagcctggtgtggtgcctcacacctgcaatcccatcactttgggaggcccaggtaggaggatcagttgagcccaggagttccagaacagcatgggtaacatagtgagaccccagctctacacaaaatttaaaaattagctgggcatggtggcaagtgcctgtagtcccagctacctgtgaagctgaggtgggaggatcacttgaacctgggggggtcagggctacagtgagccatgatcgtgccgctgcactccatcctgggcaacagacagagaaaaaacagaaatgctggcctctgattctggttctgtcagcatgctatcacactcttatttactgttacttatttcctgattgagcacataatactaaactggcatttttactctctagcccccagtgttcccttgggccctctggcttaatgcgtttgacatttaatactatatccttatagaactctagaaagtgcaaactgaaatttagcacaacagttaagactaccttactaatgagaatattttcaaaattatcaaaaataaatctctaggacttggaaacaaattaaaatttcagaaagacttaactgagaagacatttatataacagaactggagacttgtataaaaattagtagttttattttttagtacctaagacaccagaacacaatgcctaaatatagcttgagagtccagtttaatttttcaaactactctccaaattgtaataacatgccaatataccaagtagtgctagtttttgctaacatgccaatttattgattttatgtaaagatttacggctcatcgtccttaaaactaagctagctctaaagcatggagtcggttctctcataatcttatttattttagtccccgatttttctaaatagtaaaagttacttttccattcaggaggtcaagggctggaaacttaatttattcatatttgtgtacccaatgcctataaaaattcctccaatataatatagacatttgacaaattgttcattgaaccaaattatctcaaatcccatacatgtagaaattaataacattttactgcataaagtctttttgaatttatattttatctaagattacaggttgtttaaatactcatctggctgaaaagctgttcaaatttccatttagaaatccccagctgagggcaacccgctggggtcccccttccacactgtggaagctttgttctttcactctttgcaataaatcttgctgctgctcacaaaaaaaaaaaaaaaaaaaaaaaacaacgaaatccccagctgcatactgcaaatatatttaacatatcatattttttctcattaaatgtctattaaatgttttagaaattttacattcagacttagataaattagtgactattagaatggcagtggcaaagtgaccttataaagaattgttttcaatgttcaagcatactatttatttgtctgttaaattactgagtgatatggtttagctgtgtccccacccaaatctcatcttgaattgtaactcccacaattcccacgtgacatgggaggaacctggtgggaggagactgagttatgggggcagatctttcctgtgttgttctcgtgatagtgaatgagtctcacaagatctgagggttttaaaaacaggagttccctgcacaagctctctctttgcctgccaccatccatataagacgtgacttgctcctccttccaccatgactgtgaagcctacccagccaataaacctcttccttttgtaaattgcccagtctcaagtaggtctttatcagcagcatgaaaatggactaacacactgagcaacggaatacaactggatttagtctcatgagagtaacttgaattagacgaaaaactatgacctcttatttttcctcttatatcaaaagttacaaaagattgctctaaagaaaaatttcaaaaaaagtacatcaactagaaattgagtctctgaattgactcagatggaaaaaaaaataagaaagacaagatcttaatggaattttttatggaggaagtattggaataaaagaaatgttcaacttgcctgttgacagtctaatctggttctattcattaatcattaaaatcttaaatgaagaaaagcaatatccaaaaaagaaagtttttaatagagagagaagcagtcaggagtttaagaccaggatttacagaagagactaagcaaggagaaatattctgaaacataggaaagaaatataacagttgttggatacccctttgctagtgactcagtattattttccttttcattttgttctgtatatataaaataatacaaagtaaaaatataaatactacataatatagatgctgacaaatttaattttcatcactattcatcagaagaagcaaattatatagccccctaccaaatgcttaacactattaaattatggttagttttaaaatattcatgtctatatttgcagaagtataaattacaattctcttataatcaggaagttgtaactttttgttttgaaaagaaattacataaggacataattaatttattattgtaatatgctaaaaatactttttcattaagttactaaaattgcatgaacatattattacataaacctagattttgtgttaatattttgcctgatttattttaagaacagaatacatataataatttggtcatattatatcctttatttttgcctactcagaataaatctcaatggtttaggttggtatttcagattgaaagggaaagcagaatgccacatattgtccataattttgttatctttgattctcatatttaataaatcaattttgctaagggctatgtcaagaacagattttaatgcaaatttaacactaacagaataaggcatacccaggaaataattaatagtaaattttaaggatttctgcccattttaaacacaagcatattttaattaaccaataaatagttattgagtatcaattagtgcagggctttgtaggagaaaatattataaatacaagacatgtcaaagctatttcaatgactggagtggcactcaatatgtgctttagacaactccctccatcacagggaagtgtgtctaaagaacattagaagatggacaagaacaaccattgggcattttattttgcaaatttttaaaaagcaattttctaagaacaaaaggactgcattgggcttagcaaatttataaagatagtactgtactgcccgcatttcttcattgtagttgagtcttcttcccacaatggcttattgtgcacattacgaagtcttcagggtcttcagaattaaagtgacagagtgtgtgtgtgtgtgtgtgtgtgtgtgtgtgtgtgtgtgtgtttaaaatgcacatttgagaatggaatattcttccttcctctaaacataatatgcctttacagactcctccaataagtctagtcatcttgacaaaagaaaatcaccaagacaatacaatgttttcacaaagaaaaagaatgacagtttcccttctacttttcaaaaatgtttcataatatgatttgagattggctttattcagtaggcttaaagaggaatcaattcttacaaagtgacactctctataataaagaacacctacacttctgaataacgcatccattcccacacattcacaaggttattaccattaaaatcttctccagaagaattttctgacaaggaaagtatggctttgtttagaataagctgacaatgtcagtaaaacaagcaataaaatataaagggttgagggttttgtttttcgtttcacttctgcaactctggtaaaagtctctattatatcttgccttcactaatgagactggtgttctgcctatcaatggttcatttatacaactacttattgtactcctactacgcaccaagtgtgtgttaagtgctggttacagtaatagtcaaaatagacaaggtcccttctctcacagtgtagacagatttagacaactaatcccataaatagctatatgattacatattatgagtacaatgaaagaacagtactgggtgttgacagagaaaactaggaagacagaatttagactgaaatttctcagtttaagctgggctctgaaggatggcaaagagtttgccagatgaagagttagcagagcattccagaggtcataacttataggaaggtcccggttgttgaattcgcaacttcaagtaaagcagtgggctcaagtgcaagcaagaggaagcagaatgtcacctgccaaggctatggcctgttggtgatatgaaaagattcccattttttcctgagagcagtgggaattgactaaaggatctgaagtaggggaataaaatgctgttatttacattttataaagatgatttttacctactgcctgaaaaatagatttggtggggtctctcatgaggggagtctcagagacaaaattccgtctgaggggggggtctcacagtcaaaactctccagttgagtttcatatccttgcataaaatgacccttgccatctctattatttccctccatgtgcactgtgtccagccacatggcacacacagccattctcaaatttgcctccccacctaacacagggttatgcttttgtctcagttcccaccaccaccctcttcagcccctcacttctttactagttaaaatctcaaggagatttagatgagatttaggaatcgagctttgagtcagttgtgctaaaggaggtacacttgactcaaaggccaatgtctccatgaagatttttcactattctttaaactccatggcactcggtataaaaaatttgagcagcaaagaaggagcactgaataaagaactgactttggccttaactgttaaggcccagagttatgtgtctcctaagagtactcaacatagagtaccccaaccctcaccaatacacacccaagtcctgggctgaaaaccattattcctttcttttagacttttttttttttttttttgagacagggtctcactctgttacccaggctagagtacagtggtgtgatcacagcttactccatcctctgcttcccaggctcaactgatcctcccacctcagcctcctgagtagctgagactacaggcgcacaccactatgcttggcttacgttttattttttttttgtagagatggggtcttgccacattgcccaggctagattttttttaatgcagaattctatttaaaagacaatttaaaaatacatgtttatgctgctgacattaagatcttatttgcagacatgcttacataccaacaaaaacttcagttagctaatttttctatttccatgcttaataatctccctctgattgtgggggaaagcatggatatatctaatgaaatatagtaaatccaacagactttaagaagagctaagtctcaatccttccgggtctcaatacccatttcttaaagttatatttctcctcaaagctgccctagaactgggtcacagttttatctagaaagcatagctagattgactccaacacaaagtatcttacattacacttttctttattgtatatggtctacctacttccaaaaggaattgcaggttcctttaaatgacaactttcagttcctggcacttgcaaactgcttaaagtttggctccctgcaacgctccatagagaggagcaggcggatctaattgaatcacagtttgtggttctgctgtactccaaccaacaaatgtagacagaccataatcagtcacatacataattgtgggttctaaaatatcattttgtctaaaaaaaactccaacgaaacatgtaaaaataagattttggataaattaactttgacgacatttgactaacattatctcaaaaataattctacaggaatcattttatgaaaaaaatatacaatccatattggtttaattatgaaattttgactcaacgaaacttaagaaacgagccaacattttactcatggtctctagaggcatctccttattactcaccttgatctctttcgtgccatgttcgacttccagcagctggtgaacttggagaggggtaaaagtctcctgtaggacttggttccatattttcatctatggatatagttttgggtcttttgctgttaaaatatggcaatagttatattaatgggatttctgggaagatgtgtacattttaaagtaaatgatctgagaagatccttactgtgaaaattttcataagcacaagtaataatggtgagtataatggtgagtattgaagatatcaatagtaatagcaaatatttctagttgcatataccatttattagaccatcttatacctaacctgtctaacaaatatggtgttcattatatttatctttcaaatgtatttccaaaaaaaattccactaataaaaagtgaactcttaatgttgtttgccttctaacattaaaattgtgttattgtgtacctgactcattattattatcaatactaacaatgttccttttaatagcacttgtcattgacaatgcaatccaaagataaggtaataaagtaaaacaagagctttggggtcaagacagtcctagtataaaatcttgagtaggccacttatgaattgctaatagtaagctccttaacttatctaaactcagtttaatcatctgtaaattggaaacaataaaacctagttcaaaggcagacggttggaagagtaaaatgagttgttaaatgtaaagcttttagttaagtggctggcatttagaagatacttatcaaatagtaattcttagtaataaccctatcattaataataaaaaattatagtattttactgattataaactatttcatatattattctttactttttcttaaaacttagattattgattctttattcttaaaatcgactgtgaaaaaaagaaggccactgccaaattcaaacttttaaaatgatactttttttttttttttttttttgagactgggtctcactctttcacctacgatgtagtacactgtggctcaatcttggctcacagcaaactccacctcccaggctcaaacaatcctcccacctcagcctcccaagtagcttgaactataggtgcctgtcaccacacccagctgattttagtattttttgtagagatggggttttgctattttgccctggctggtgttgaattcctggactcaagcgatcctcccacttcagcctcccaaagtgctgggattacaggcaggagccactgtgctcagccaaaatgatacattttaatatggaaatatgactcatctcaatgaataagaaaggtgactatccagaacaaagattaagaagctattttatacccatagtggttgatatacttctttcatatgcccccaccaataaagcagacaattatgaaattatgactataaaagtgaattcttttctttttttgtttgtttgtttttgagacagggtctcactctgttgtccaggctggagtgcagttgcatgaccacagctcactgcagcctcaagctcctgggctcaagtgatcctcctaccacagccgcccaaatagttaggatcacacacacatgccaccaagccttgctaattaaaaaaattttttgtagagagggagttgtccaggctggtcttgaactcctaggttcaagtgatcctcctgcctgggcctcccaaagtactgggaatccagctgtgagtcactgtgcccagtgaatattttttctttaattaaaaaaaaaatcttattcacacctatgctggtaaaacctttttaaaaatcttcaaaattcacttttcgcagcaataataaccataatgttataggatttcagcattgaaattgacctcaaaaatcatatacataaaccaatccccttgtttttacaaatggggagacacatttggagagattcagtggactgtccagggcaagttaatggaagcagtcagacataaggtaaggacgtctgacttccgcaagtgtgctctttccactgcactgtgtttccaagcccttgaatcatgtatatgcctgagtacatttgtagatactcatgattaatatttgactcacaattctcagagtattaacgatgtagaagatggcaatttctatccatgctaagcttagtttcttcccaaagaatccaaagttagaccttacattttaactctcttttaaacatattctctcatctatgagtcagcagaaaatctgcctgaaaaacttaaaattggggacaaattacatgcataaggaagtactagagaaatgttttttaaaccttgcttactctgaaagacagtatcttatataaagtagtcaggaagaaagatctgtgttgacaacagtgatttagcagacagaatttaaaaattactgctcacattttaaatttagaaaaatcaaagcatttctaagactttgatatgtcagagactattttaataataaaccaaattatcttgctacacaatttaactatatgaaaatggtttaaccggaactgatataaaattgatcttagtttataaacatacacatgcccagtccataattaattcaaattcaacgaactttcactactgagaatactttagaaaaataaatatacaggtatccttttatttttaaaaagttgacattgtaaaatgagtgttttgctctagaattcatgtatgctcttatatttgattacacatatatttaatgctctaggaatgagatgggtcttgaagatctagctcaaataaaaaaaaattaacacatctgtaatctttattcaccctgactggcaattacaatgagaagatcaggaaaaaaaaaatgagaatgttaacagagaagtaaaaagcaaagagaactctctctagctgacccccaacatagaatggttaaaccaaatctcagggaaggtagtattttcattggtaacagagcgttaattaaattagtcaaaaaacatcaactaattgaagaacttggcaaactgtggtctttaattttaaggctaggtaaatgacacattttattttttatgtttcattatcctaagcttagatgtaatatttgggtaaaagttaccaggaatcagttataaaccagagatcattgccacagcaacatcatttttaaagccatcaaaagattttgttaacttgtagcattttaatatttcctacaacaggacaaaagtcatattaatatattttcctagttacctgtccccctgaaaaagatttttaaaactgctgtgtacaacaattacatttaatttgtaacagccaaataaatttaaccaggaaagattaaaaatctgtgtactaccagcaaaaattatttcccatctctctttacctacctacctatctatctgcctatcatccacctacgaacctatgtgtgtatcacttgagaatatgagcagcccttctttcagtacctgcttggtggagaagacagagacctctgaagattgacccccgagttcatgtcatgatagtatggttggcttgggatttctccaattgggaagttgactccagttccctgggttatgggcgctgaggaataagacaaagaagcactgggaatgacattcgtatttctgacctctattcaaatgtaataatcgagaatctttcatgcctctggtcaaagatagagagaactttcttcaccttaagcctctaatacccaccatacaacctgggtaggacctgaaaacttgctcaccttagcaacgttcaagcttggaaatttgaggcaatcagattataatcactggttaccaatttcccgaatcctattcctcaaccttctttactcactcctttatattagttgacattacatctgtcactctgctagttaaaaatgccttggaggaaacagaatatacgagtcctatcactcagcaacaccaaacaagctgctttgcactacctaggctctcgaaaaccaaatcattgttaaataaataaacagagaaccgtttcacaaaaaaaagcaaaaatcattattcacagcctcccagttaggatatgataataattattaatatcatgacttctaatccactcaaatattaatgttgatattaatgttgataatatagaataataatttttggtttgtaacacaaaggataaatgcttcaggtgatggataccccatttaccctgatgtgattattatgcattgtatgtctttatcaaaatatctcatgatattttgtataattacatctgttcacattttttaaatttaattttagatatcatgaacaaagctgtgaggcagcatattgtgttagaatcagcagagtcttgagagataaatagccttttagtttaaactccctctgtattataagttatgtgccctagtttcctaactgtaaaatgggagtaataataaccggacacataggattattttgaggatgaaatgaaataggtagtgataagagcctagaatcatgcctagtgtataacacgtgctcaaccattgtgagttcccttccttctttgctttctcctccaaacttcttccctggtagactggaatggttagcaaagatgaacagttcaaaaacgtgttaaaagcagaggaagaggtataaatgaacctgttcgctgaaaatttgttcattcaacaaattactgactgtgtccactgctggcaggtgttggctgcaatgtgtacaaaatagtctcatatattgcccttaataaaaatattgggcaacaagctgggtaagtaaaacattcatgcgaaacacataaataccaaaatagatgaaaatgaaactgtccaaattaatgacatgatccaaaactgctgtagaatttcaagggaaaaagaatccaataccagcttgaattgtccaagaagtctgcgaaaagccatagctggcactggactctggagaatgagtaagagattagagggaggtcattctaaacagggactgctgcagaagcaaaatcataggtagagataatgtgcaaagtggagaccaggcaggttggtgtcaaagaactccttaagaatagtttccatttctttacctgtcttaatcagcccttcaaaagctcacacgaaattgtactctggggctttgcaacaaaattctagagcccctgagatgcactctaagcatacgtggtctacttaaactcctcctctctcccatctgcctcaagttgagtataaaattccaaagggattgcagatttttatggaagttttcttacccctcatttttaatgaatattctaaatgtgttcactaccctttgaattgtattttaatattaggcaggctaagattaacttaaaatatttttaagaaagtatgattaggaggtacaagctttatcacagagaagtaaccacggaatacacaatgaacatctccctttctggactaaaaattaaatacatcagtatatacatgactagtaacagctccaaacttctggattatctatcagccttctgatagattgttcatgttatataatacactgtaacatcctttacacagaaaatacttgtatccaatgagtaactaagtgcctgatggcttgaattatttggacagctaaaatgtagctatgtctgttgtggcttgaggcacaccaaaggttaaaaaaatgtgaggtaagaaatcccacagtaaccgcatgttttataatttattattagaaccatgttctatatgacactggaagtggggtacatgctagaaggagtatttcaggggctcaagtgaagtaaacaatctgtctggcttcctatcacagtaatggatacaattcatagacctgagttattaacaggaaacttagaggttccaccttacataaactattttcaatttattaagctcatgcaatatttaggcaaagatttatagtttctattgaatacatatggctccatagttaacataatttgcttacccataaataaactagatgtaatttgtagtaaatgataattttaaaatcttcagaaattgtttttttctaaattttgttccagaaagattattccgcagtgtcaagacagcaataaaaacgacaaatatagcatgttctcactcatacatgggagcttaaaaagttgatctcatcgaaggggttgtcagaggtgggggagggtggggaggtgaggagatgaagagagattggttaatgggtaaaaacatacagttataatagacagaaagaataatttccagtatttgatagcacagcagggtggctacagttaacaacaatatattacatattttaaaatagcaaaaaaagaagatttgaaacattcccaacatgaagaaatgataaatgtttgagatgacagatatcctaaatagcctgatttaatcattatacactgtatgcatggatccagagatcacatggattccataaatatgtacacatattatgttttaattttgtaaagatagcaataaaataatttgtctacggatttatgcatgagcactgtaaaaatttagtatgcattctgacactaaatgggagatacagaaaggaaagtagattaacaaacacggccaaagtactaaaacaacacacatggaaattatttaatgacagagtgtgtgggaacagcaagtctcagtcagatattcctgcttaagagcctctggaagaacttacatcagacgcaaagatcagtgttagcgcctctcccagggagctacaagaaggctgaaagctgcaaatcatgtttaagaggatgccgatatcctcttagaaatgaagcaccaaagaacctcagattctaagggttagaggccaacctttaatctcccttattgttctcctcactccaaaagctgatcctaaatcaacttttaagatggagataatatcattcaaaagagagatcactatcctaatgctgaatggcttcattagctaaagtcaacatacacatcagtgggtcttatgattgtaaaaccctagaggactgaaagcactagcatactgtaaaccctcaagaagtcagaatttgtgatacacacatagtgttgtgctgaagtttatgtttacttagcaaacccctatttcataaataatgaagtttaattgtgtaaacaaagattatgatgcggatatattaaaacacttaggaggagaacttatcaggcctttcagagacacctatttacatatggaggagaaaataaatgtttgctgaataaattacgtaatgaatatagataattaatgtgctaattacaaatcagtaatgtttgttataacaaataacctaaaagtttctaggatatgacattataagttaagaatgaatgaatgaagtatattaaatttaccttggttttgaactgttctagaaagataattttcatctttgttttaatgtttgaaattcagatttttcaaaatatctatctgggcttttgaaggttctaatgtggttctcctttgacagcccttagcataatattacctatcatgaggtactaaataaatattttctgacagctgactctactgccctactcctaagaaggatgaaaatataccattgaacttgaactcagagaagtacaaatttaagcaaataatttaataagcctcctaactggagcaccataagcctttccgctaaagaagagtatggggaagacacacacaccccttcagataacccctgtcttacctgatgctacaaagtgctactggtaagtcaggcatatttcttcccaaattaaaagtgaaaactttcaaatgttggatacctttggatatcacatattgatctggaaaaacacattaaggtacactgccttggacaatctccttgcccatcgaatacacaccctggggctaccagaatacaggatatttgtgtttcttctcctacactgccaccatgtaaaaagacccatgagagaagtcttttgggcatacatttatccactctagaattataccagaaaggataaactacttaagatcttaaacgttcatatgtatcactccctgctatacatgctatttgcactgttcactttagaaatgtgagctatttgaggaactacggttcaaaagacagtcagtgatagcgtgaagattcctttactgaacaacaagactctaaaacactgcttattcttatcctcagtaactcgattactctttgttctttctggatcatcataattcttattcatgacctctaaatatgacccaaatgagaaacacaacttaggcaggtatcagagtgtgactacatcatctgaataacatcactccgaagtgtgatgcattctatcaaaatgtcaggtgaaaatatacccttcaaagttacataaataagctaaatcagtgaagggagtatgaagaaaggagtcaccttctttaacataattagtacatatagatctgcatcttggatatgtttgtacatgctagtaataagtaaaagagttaatcaaggtaacgtcccctttgcttaggtagcctgccaggtgagcttagcctagaaaaatctgatccagcctgctaagaatggtgtctcaggtgaagtggccagttaaaacaattggacattgttttggataacaatgctttctatctatatccaactacaatctgcaaagttaatttctgcatccctctacactctgcacgttagtgtgtatatcctgtgcatctccaacccccaccaaaatgttagtaaaatgaaaaagcacttatctacaggaaacttatgtgggttatcataacaacatagagtacatttaattaatcacacttcctttgatataaatggccatctatggtcatgcagagaacagtgaattaaatgaataccaataacatggcaatcagaaaaaccccaaaattatttttgtacaacaaaaagttttgatgatttgaatgcaaacattttagaaaatcaagcaaaatatattgttatttcatcaaaggttttaagattttaattcaaattttcctaatatgtggtcactctttatactacatttaaggttcaaaatataaagtattttaaatcatactgcatgcttaagtagtaacaaaacaatttacttacttctggatactcttacaagttctgatacattgaagactccagattttacaaaactatcctcaaggtaacctgaaaataaatattaaaggaaaaatgatcaatataagcagaaagtaaaataaatgattatacactagaatttaagtgttttaaagccaatggtttgaacaaaaaccaaatatgcttacaataaggactttaaaaaatgactcttaggaatgcaaattaggtttgtttaaacaaaaataaaaagtttagataccaaataatctcttaggaaaattttttcttccctttctaaaagtacaggtttattgatgcggtttgatttgccatggcccatgcatacagaatggtctgtgggctctcagtgaatgcttttgactcggtagcacctggtagactaaagcgaaaaatgaaagaaagaaaaaggaaaccacaaccacaattagcaccttgctggaataatgtcaaagatctcttaaagccaccgttcttttgtaaacccttctctgatgaaagaaaagtgaactgctgttaccagcaccccgacccttgttccagggtcactaataacataaaaagcagaacttgtatatacagcaaatacagaactttgcgttgacctatttctgggcatctttaatatacgttgcacgatttcactgctttcctcacccttgctactattccactggactccttttatttcaagaattagacaacttttctggcaaatggtggtgaatccaggcctctgggaatgccacatgacccttaagtcacaccggggcagggtccacagtggccatggagcctgcttgctagctggtctatgtccaaaactagagatgagaactcccacaaacaacagtaaccctgcacccagcccaccccattctcatctatgttaagggggtgtaatgagtgtgaggaataccttagcaggggaggttatggcctacttgcttctgtcctagggtgagaataagtttgaaaatcctcagaattgaaatacatctgagaaacaaacaaacaaaactagattctaagaactggcaatttgactggattttacataaagcttcagggctgaccaaggaattagatgcagttcagagatgtgaagcatgggtagtgcagcaacatggagcactgaaatcaaagagctgggatttgaatcctagccacagatgaccagttatgaaatcttggctaggttattagtcctctttttgcctcagattcctcacttaacaaattggagacaataaaaatcacctatcttatagagttgttactactggagataaaaatataaaccccatgataagcatgttaccaacaaattaagatcttagggccagtggaacctgcgatcagctatataccgaattacgcacactggcctccagacagtccaaaatgatccgcaaatctttattcagaaaatttaccagaacaaaaggcaccacactgcttttcaaccatacatagcatgaaaagacagaaaatcattcaattagcatatgtgtttcactgctgtgaactgaggagccactgatgtttgacatccacccacccaccttctttagaaacagaatgaaagaaggagtgagaggaagttgtaagatctcagtagggaataaaacaggtgccacattaagtcattattctgaaaaatatatatacatttttaagagtattataacaaaatgtcccaatttaatgcacttctattttaagaaactcttatttcttgagcaattaatttttaccaggttaaattcatttcagtaattattgagaaacttctaagtaacaatcactgtacaaggtgctaaaagtcatgaatacaaaaaaggacactgactgtcttgcctggtcggggaaagagatgttttgactcttctggaccactgtaacttactatcatatagaaagatttttgttgcttttgttattgtttatagttcattatactttattttatatagggtaaacttaataaagtaaatatattaagtacaaaaccttctttatcttgggaggccgaggtgggtggatcacaagatcaggagtttgagaccagcctggccaatatggtgaaaccccatctccactaaaaatacaaaaattagccgggcatggtggcgggcacctgtagtctcagctactcgggaggccgaggcaggagaatcacttgaacccggaaggcagaggttgtagtgagccgagatggagccattgcattccagtctgggcgacagaacaagactccatctcaaaaaaaaaaaaaaaacaaaacaaaacaaaaaaacaaaacaacctcctttatcatgactacagctcatatacttaaccagtcacacaagattatttttcatcacccaattgtactttgtaaatgcctacccttcatatcttcctcctgcagctccctgagatgagatggccctctttctacacactctagtctcatccttcaaaatccagcccaaccaccacccactctgtaaactgctcctccaactccttctaccacccactggcccagccagaaatctccttcctctgtacttgtatagcacctagtttgtactaattttatactttgtactttcagattttctgagagatctgttttcaagtcttgcagtcattgctggattatcagatcctttatttacagaagtgactgggttttgttcatctctatatcttccttaatgactaactcgttgcctatatatagagtaagtactaaataaacacagaacaaaattttaaaattcaactttacaaacagggtcacacattaacatcttagtcattttattacaatgtagatacagatggtttaagatttatggataattatactaacctctgttattccctagaacttgtttgctgaagagtgtatttaggcttttgggtcacatgagaaagagtaatgattagggtcggattgtatctcttactttgttgtgtactaatgtgtaatgtcaagcatttaatacaaagtaacaaccaaagaactggaagtgtttaaatagtaagagcccaaaaatatttgtgaaacacatcgatgaataagtgatgaacatttcaatgtatttacataaactatatcagaggtaatacaaaataacattacaatatctatgtgtaatctgaagttcatttccttattactccaatgagaagtcagagatccatctgctcctaagtcatgaccattaagatggagtggggtgtgagcctgttggaagccaaatcatgaagaagggatgagtcagctcaaggccaattctaccagtgggaagacagtcaggcagtcaaacacagacaatacaatgactattgcagctattcacagaaaaaaagaagacaattcagaatgtagcagggtgtttctccactccccacccccaacttcccaggttctaagaaattggaatctacggaaacaatggaaagaggtagtttaccgaaaccatgaaaagcattggaaatatatcagaacttctttggaacctactggataaaatgcaaaaaaccacagaggtcccactgggctctactcctgcatggagcccagtgagactttagtggaggaaggtttcctgaggatgagtgatgatgcctattaaccatgtacctatgggaacagggacaggtgagaatcagccaagtggggtagcctgggagaagcaccggaagcagatggctgccaccttcatgcatctctgcaggcagcatagcctttgtaacggacaggcattaaccaagacgtggcagagtgaaaaagaaatcatggatgaaatagtactcagatacttaaaatagtacttggatacctactagtgcttactcattagcatacagaagacaatacttgagggctgtagcaaaataactgagaggattttgaaatgggcaggggtcctgcagtaggatagggggtgaaactcagcaaaatgtcaggttatctgctgctaacataaccccatctgtaacctccaaggtccttgggcctttcaggaacatgtttttcacatttcatagaccactgtaaatctaaatagctaatacaacagctaaagatcttaaagcaatttggagacattcatatagtaaattcccttcgtctaccaaaggaaatatgagcatctctgaggcagagcagctgcttaatggttacagagcaatattacacaacagcttaatccaggaagaaaagaacaactctgcatttgtgtgatgctgtatttacactacatgtgtgctttttaaaaaaaataaaattgagtaggaaataaagacttctacaaactgaaaagtctcaaaggcaatatcaaattatattattttacttcttttttatttttctctgacaaaagcaacagtaaatcactactcagaagttaatatactgtttaacctcctttacaaacaataacagagggacacaatggcatatctaactgttaatatctcaaattataatcagtaccatttgaatgttaaacaacatttacatagaaaatccaaaggaagactgataatgctcatttttacagtctactgtgttctattcttgaaattaaaaaaaaagaagccacagaaagcagttattaaattcatgaaagccgtcttcaagtattcgaaggactattaatgtagatggtggatttgacttattctgcatagttccaggagctgttttttggctcaataaacagatttgtcatccaatgggaacaggcctaaaaaggcatgtgaaattttgcaaaggtagcataaccaatatattcccaacaactgtgatgaccttcacaagcaggcattaacttcacgttcaccattatcttataaaatatgtcatattattggtgttgccattttacagatgaggaaactttcatcttacagagatagtttctcagtggctataaagactcccactggatataaaaattcttgctttgtgaaggaaatctcaaaaaaaaaaaaaaaaaaaacagaaaaaaagaagaaagcatctcaaaagccactgcaacccacagattctcccttcttacacagatgttttcctatgttagttttctggcattgttcatttggagaacaaacaggtggacataagacatctataggcattttccagccctatgattgcaattgttcactttcttcaacagagtttaaaagaaggcttaattctttttgtaaagggacaagaagagattactttatactagctctttgccaatcttcatataacttcagataccacaactaacccattggtaattttctggtagtgatgttacaggacatagttctatcttcagtttctcaactgacttgaactatccatggttaaagctaaacttgtgttgaagttaaagctgaaactgtgattataaaatagaaatattaatcattgcaaagacggtgattttcttcacagagattaaatctcagcctatagcccaggttaacattcaaatattaatttagaattaagtgtatctctcaatatgaaacgtaaacccacgaggatgatttaggtgatcttggagggagtcagaaatttcccaactttaacacgccctgatagcattatatttttttcaatatttccttccagtcctttaaactttttccgcatatatatatatatttatttataaaatcaatatcaaatttaaatatagttgtatccagcttttttcctattaacattgtatctgtccttttagataaagtttttcaaaagcatgatctttatgactatatattgcatggctgtatcatactttatattaaccattccattgtttggcattttaggttatttcccaatttttaaaatataataaacaaatagcactgtaattaacatcctcatacacaaatctttgtcagccattctcatgatttccttaggctggagttcccagaattagaattacagggtcaaaggacataaactcttttaaaactcttggtaaaaactgtcaagcagctttccacaaagttgttttgccaacttacactccttagggcaagctgtgagcatgtccatctcacaatcctgctgccagacttacatattagtagggatttgtttttaattgtggcaagttgatagagaaaaaaggtcattacattaatgttacaactttcatttatttcattttaataaaatggactcatttcagatatatgagcatatttctttcaccagaacattaagaaacaaaacattttaaaaatcagaacattcataaatacacaaacattaaaaatatataaaatagaaattgtgctagcaggaaatttttttcctaatatcaatgagattgcatctacagtttcacaatgaaaatgttggctatgaatttatcactgatttttttttctcattatctgaaaaagtactcacttattcctagttttctcagatttttaaaaagttttctgacgagaatggctattgaatattatcaaattcttttttggcattagtagagattctccggtttttttctaacagcatttattggtgttatatattactgaattcgtagatttaattatctttgctcatccatggaagacagttcttaaatttactgttgaactggttggctcagtttcttctaatatttctacaggtagctggaaagcttttatggaaatttttgtattttatttgtcaagtttttataccaggagtatacacatgcttcataaaatggttttgatcattgtcccaatatgttttatgctctggaacaaaacaaaatattatttcataaaaagttattgaatgtttggaaaactttactagtaatatcatcttccttgaatctgttgcagagaagactcttagataactctgaatcgtgaatactattctacttttgctttctaatgttgagataaattttattatatattttccaaaaaaattcaatttttcagatttataaatttattagcaccgttattttacagtttactaagtgggctatgtttatttttatggcataataaaattaaatgtatgccctcttatctttttaatggatgtggaaggtatgcctctctccaacggtgttaaagcatactagctaaaaaggcagccctggggcaagactatcaccatttactatgtaaacctaaggcaagctgtctaactcttctacacctcacatttctcttccctaaaatataggtaataatcatactacctatgagtagatgcaaaaattgcataatcttttcaagtaatagtaaagcagacatctcaagagcaggaaaagaaaaagtagaatttccaaattagcaaagagaaaagaaaacacaataaataagaatgcaatcaaggcagcaaaaataagaaaataggatgtaaaaatatataataatatgaagtaaaatataagggataaaataaaatacataaatcactacaataaatgtatatggactgaattttcccataaagggagtttaggtcaactgaaaaatacaaaatccaactgttttcaagaaacacacctaacacaaaatgataataaagagaacaaaaagttgtaaataaatgggtaggcaaagagaaatcaggcaaattcaaacaaaaaggaagcagtatcagcaacggttaagagaaaacttaagctgaattacaacaaagataattataaatggataaaaggcacaattaataaagaagataaatcataaaccccacatgcaccaaaaaatattatgaatacaatctattaaaatacaagaaactttataaaaaataaagtcacagtgagaatttttactattaatgtatctttttaagaattgaacatgactgttagacaaagactaacttcatatcattcaaatacaaattatattttactgatatgttcatggaacttctaaaaacatcgatcatgtttttgaccaaagaggcaactttaacaaatccctaaaagtacagacttttaaggccatactgtctcatctttggcaaataaaagtaaataataaaaaaatgactgaattatctcaactacctagaaattaagaaaataaaccatgaaccaaagagaaaaatcaaaagggaaattataaactatctaaaaagcaatgaaaagaaaaagaagaaagaaagaaacccattacttaccataaaagaaagaacagcatcacaaccaccccaaaaattaaaaagatgaaattaaacataaaagctgaaattaacagaatagaaaaaaagaaatatttaaaaaaataaataaaacaaatgactctctaaaaagaccaacaagacagaaaaaccacttccatgcctgattaagggaaaaagagaaagtaaaaatatacaagtatagtcatgaatggcttaatggcagggacacattctgagaaatgtgttaataggcaatttcatggttgtatgaacatcacagagtgtacttacacaaacctagatggtataacctactacacacctaggctatatgcatgaaattgcatatagctcctaggctacaaacctgtatagcatactactgtactgataccgtaggggattttaagacaatggtatgtgtgtatctaaacatatctgaacatagcaaaggtaccataaaaatattataatcttatgggaccactgccatatgtaatctgtcttcgactgacctatcatgatgtggtacatgacatacaaatataaaaagaagacataaccatagaaatcaaatacattaaaacaattatgagagaataatacatacaacttattgactacaactttgaaaacttaaatgggcaagtattagtaaactaaaagtaaccaaaattgagcagagaagtgtaaaacctgagtggaccgattatcctagtgtagtggttgccaaatttgctgaacactggaaccatctgggattcttgaaagcagtttatgtttggcttccaaccccagctattctgatttaattgatatggggtgagacctggacatgagaactcttttaaaagttcccccaagtgattcaaatgtacagcaaagtttgggaatcactatgacaccacattcagaatgtggttccagagccactagcactggcataactggggagcttattagaagtgaagaagaataggctctaccccagaccctcagaatcagaatccacagcttaatgagatctgcaggtgattcataagtgtacttaaaaatttgacaatcctagaacatactagaaatgtgagtaagaaccacctttgaaaacagcaccaggtccaggcgagtgcacagctggattttatgtatcctttatctagtctttaggttccaatgttatttacactctcccaggccttaggaaataagacaagcttcctcatgaagaacactttcttataagcctctatgaggccagcaaaacttgaatacctaaatttgtagcctctctcatcgaaacaaaacaatgaaccaaccaatgaaagatcaagcacacaagtaaatgtgacttcaagatgcctaaataaaatatgaaattgaatacagcaatattatcaaaagaacaatacactattataatcagggtttattccatgaatgagtgcagctcactatgagaaaagctatcattacgatagaggaaaaagtcatatgaccatatcaagatgctgaaaatgtacttgacaccaagaggcaggcttacctaataataaatctaagcacaaatagagacaaagcaaataatacagactcttcagcaaaattcaacaataaattattctaaaaggggaacactagtctgtcattcctattttcccaacctccccagcctcctcctctttgcagcccttaaaaatgtaatctggaaaaaagccagtcacaaaaagacaaatactgtataattccacttacatgaactatctagggtagtcaaactcatagaaacaaagtcacatggtggttgccaggggctggggagagtagggaatggagagctgttatttaacaggtattgagtttcagttttgcaagatgaaaagtttctggaggttggttgcacaatgacgtgaatacatttcacactactgtattgtacacttaaaaatggttaagatgacaaatttaatgttacgcgtatttcactaaaatttaaaaatgcagtctaaaattttggacccagattgttaaccacattcttgtttacatatattcaagaacaatcttttacattgacatttatgtctgtcatcttatttataacaattacttggtcataattctcaccttaattgttactattctcatgattagtctctatctatatttttattcatatatttatggttatactttcctgttcttaatttttttattgagtcatcacattgccagtcagaataggtattcaagtaacatttttgcaaataaaatgaggaactctattttttgataccatgagtaataaagaatatatttccattgcctttgactgtaggtgaaactccttgagtgaaaaacaatgttttttccatcacaatttcaagtattctcccactgtctcctgttatttaatgtcgataaaaggaaatctagaagtaacttgtttttcatccaggacatttcaaaattttcttcatccacgaaatgtaaaaatttcaacaggatatatttagatacaagcctctcattatgtggctggaatagcattagtccttttaatccacatagataatttttagctcatcaaatttttctccatttgtctttgatcctacatcctccaatttctccacaatgaacacctaaataaaccttgaattttctattctctcatcatcaacccttttctcatcatcttaacctctgtgtttcctctgcttctggaataagtatcttggggttgtcctctatatcaatgcttttttccacagtatcagtgctgtttcttactcctccgatgcaattttaacgctatgaaagcaatttagtttttcttgatattcttcctcatctcacagaataccgcatttattgaagctattcttttgtaggttcacttttcgtataagtcttctgggtaaacattttctctggaatttttttctagttctttattttcaaagatatgtcctcgtggttcttgatcatatcccatttcccttgttcctccatattttctcaccaagggcatattgttgtgtgtgtgtgtcggggggggggggttcccctttttaacatattcagtaatgtaaactaattggaagagacagaaaacagatcaataagtcatctgaagatgagggtagacgaaacctttgggattagaggaaacgtcatcatccttgagtgtggtactgatttcatgagtatatgcatacgtcagaactggctgggtgtggtggctcatgcctgtaatcccagcactctaggaggccgaggcaggtggatcacttgagtccaggagcttaagaccagcctggacaacatagcgaaaccctacatctactaaaaatacatagcatggtggtacgcgcctctagtgccagctgctcaggaggctgaggcatgagaattgcttgaacctgggaggcaggggttgcaatgagccaagatcacaccactgcactccagaccgggcaacagagtgagatgctgtctcaacaaaacaaaacaaacaaacacatatgtcaaaactcatctaactgtacactatatatatgcaacttattgtatgctattatacctcaataaagttagcaagtgacctataaagagtggtttccaaattttcaaaaagtgctatttccacagcacaaaaagaatcacaagtgaatcagaaacattcagtgtaatcaggaatatttttgaaggtatgaattacaacagtcaggtatttttttgcagcttctagaatgttatcttaccaggttcctcattcatggtcaagtgaactctaagaacactgtagtatactccctagtaaacaaaagcacaaaagcagcaaacaggacttctctataatttgtcaaactgggagaagagaaactctatccacctgagattagtattctgaatcagcaattatattggagtgctacaattctcagtcagatacctctctacaaaattcatcatcagtatgctacataagatgaggagttcagaaaaatattccaaataatcatgtctaggatgtggtatacctacagggcataagaggatcactgtaagtatctccgcagaagtacccgctttttctaggcctaggtcaggttctgagtaagggaatgatcccacacactgcaagaacaggttatttatttagtctattattggtctaagcctctgcttcataaatcttggacattgtctgtaggtaggcattgccttggatgataggtatacaaaaaagaagaatgcaatactcacccaaaggggctcagaattcattaaggggagtagatgcgaaaatagagataaaatagtgcactaaatgctagtactgtaaaacagcactgcagagaggctctgaagaagtctcactgaggaggtgacaagggagtacaagcattctaggcagagaaacaacatgagcaaagatacaaagaagcagcacacggctaacgctaaaggcatagtccatgtgtgcaacggacaaatcatgaagggtcatattgtatgtcatgctaacgagctaggcttaggctagagtggagaccttggaaccatacaaggaggtgaatgaaataatcagatttgcacatcaccacagacctgtaatggatatatcagagggattaagacatgaggcaaaatatcgctacagagattaggaaatgattaaaatgatctaggtgagctagttaaagaggcaaagtgtaaaggtttttaaagagttattaagattcagcatcaattaccttctttttaaaacattttgcccctctcatcagcagcctgagcctttgtattcattcctctgttctttctacattctttctcccaaaagctcacaagtactcccttcttcacccatcaacattatataaggtaacattattcatgtgggctatttttggatatcaatttggacatggtaagcataaaatagcagaatactttatcatgtcccaacagacatgatcatcttctagttctatcttacttatttagaaaatactgctctgcttagaaagtacttcaattcagaaaatgacagcagtccaaaataccaaattttaaaatgaaaaatccattgcattgaaaacattactgcaaaatacacaatggagccagcatcttaccattcatcatgtcactgtttgtttcatgacattaacaagtggaagtgatgattttaataagatcaaatctgaaagtcaagtggttttcctgtcttcttcctgctgaatactgcaggaacacacatacatgcaaggtatagagcactgcgcaaggggaagatatgtctagtggaatcaggaattaaaatatctcagcaaaaacaggagtttggtatgaaagatgccaaggtccctaaagagcagaatgtaagtcaaaagaccccaaaaagatttgtaacaactttgaaaaccaaaacctgaccattgtttcttaaattcttctatgatcaatgacattatcaagcaaaagctaataagagtcagctgggtgtggtggttcacgcctgtaatcccagcacttgaggaggccagggtgggcggatcacatgaggtcaggagttcaagaccagcctggccaacatggcgaaaccccacttctcctaaaaatacaaaaattagccggacacggcccatgcctgtagtcccagctactcaggaggctgaggcaggagaattgcttgaacctgggaggcaaaagttgcagtgagctgagatcatgtcactgcactccagcctgggcaacagagcaagactccttctcaaacaaacaaacaacagtcaaattaacacacaaaagtccttgcttaaattattcattacctagatacgctttcatagtcacggagaaggaaagaaaaactgagactttagtaggagatttgtccaagatctttaaatcacatcctttaatcctataaggtagaaaaagattaaaactcctcgggtaattagacacatatctacttaatattttattctgtttgcaatatattactatagaattgtactctctttttaaacattatgcttaaatatacaagtgagagttgccttagtgcctggacagtttagtccagcgagcttaacttctgcaaagttcagtgattttaacaagcctagagcaagtccactatatttgtgatacaaaacaatcccagctttccgtctgtgaggcagaaaatgctttgcattattaaattgtagctgtatgtggcaaaagcagatcttgtaaatatggagagggaaagaatttaaactgagaggaaactttggatgcaggaggccaccgtagaaggaacctgaggccaggcatggtggctcatgcttataatcccaacactttgggaggctgaggtgggaggatcacttcagcccaggagctggggaccagcctaggcaacatagcaaggctctgtctctacaaaaaaattaaaaattagctgggcatggtggcacatgcctgttgtcccagctacttgagaggcttgaggtgggaagattgtttgaacccaggaggcaggctgcagtgagccatgactatgccactgcactccagcctgggcaacaaggcaagaccccatctcggggagagggggagttacatgagatacttgggtaaaagccatcactacaacactgcccagaacagcaggtaccatcacaacctcacctagaggaatttatgactcagacgtcttttcacatgaggattctgaccctcccttaaggggaacctagacattcaactaagaaaaatataggttatagcaatagcctttaaaatttagcaaattacaagctatttctgtgcaagccctcttggaagttttctggaactaggtacagtattaattaagtgcctacatcaatatattaaaattttacttggattctatgttaccttatgacaccatttcagataacacgagaccttaaaataccgttgtaaagttaaggaaagtttgaactaactgtagcccatgaacgagtcctttctctgacagcattgtgaaaggagagtactgtgttgaaattaactcttctccccattctttctttctctgacctgtatattaacacaagtcatgaaacacaaatctgacttgctgaaaaacccctgatgactcactacttatgaacctatattctatgtcacggctttaaatgctgctcaagccttgctcagacaccaagttcccttcctttccccttcttccatgtgaaatgctctttcctcggctaggactatatccaccctacaacctcttgttcatccttttatccaaactgttccatgcatcttatattccctgggaaggggtagacatctctgactccactatgactgctcctttaaatataaacttgtgtgcacacatctcttgcccagtaggcagtcacattttttaaaggtttttcctcaatttcaggcaagaaacagtgttcagaggtcaaataagggtaatggtaactgagaggtaaaagtaaattcaagagacctttcaaagtagaatatgaatgaatatgtggaggataaggaagaaaaagggttcctgggaaagaaatcatgagcaactctaaccaagggtatctagataggattctggtgactccaggatatcttaaaaagggaaaaagcaaaaacaaagaaaacaaaaaacccaagtctggtaaaataaaataaatttaactttggaaatgttaaattggagttaaccatgagacatctagggaaacatgtccgaaaagtagttggacacataggtctaaatcattaggagagagaggtatttcaaaggtaaacatctaggagaaaaggttaatatactttaaaaatcgcaaggtactgaaaacacagagaattaaagacaaaaatctgattaagaagacagaagaaatcaccatatgcaatttttaaacataggaaggttcctggattaccaggagaggtcctgttttcagaggcacgggcaaagttttaaacagagcatggccaactaaatcaaataaatattcaggaatatggaagcaagaacaggacagaaagaaaccactggtcatggatttaatgagaatcatttcagtggggacagaagctgagaagaaatcaagatggaatttcaggggaaatcaagatgagactttgacatccttcatgccatgttacgaagaagaagagagagagatgagacacttggttaaaggggtttgtccaaatgaggaacaaaagatgtatgttttaaaataagaaataagttggtaggtaggaatcagtgaaataagaggcagagtaagagggctaggaaaagtaaaggacagacagaagtttcaatagacacagaaagttgatggcttcataaagtagaaacaccatggaaaggaaaggaggggaaaaaaattatacaatgttaatacaagcttctacaagataaattcttggtaggaaaaaagtaatctctaaagatacatttgtaccttttctcatgtcaatactgagatttatgtaacaaaagtcactccacctttccttttatgccaataggcttataacaacatttgctttctaaaaattacaattctatttcatcatgagacttgaaagcatctgtttcttttgcctcctttataaaatctctaacattctattcttatgcatcttctgtaacttcggtatgtcatcttaagcctttagagaagagcagtataaaaattcaacactttttttttttttgagacggagtctcactctgccacccaggctgctgtgcaatgacatggtctcggcccactgcaacctctgcctcccaggttcaagcgattctcctgcctcagcctcccaagtagctgggactacaggcaagtgccaccacacccggctaatttttgtatttttagtagagacggggtttcactatgttggccaggctggtctcaaactcctgaccttgtgatctgcccgcctcagcctatcaaagtgctgggattacaattcaacacatttctatttgattccacatcaaatgatactttctgcaggaagccttcttgatcaaactagctgaagagaaagtagaatgaaaaaacccctcacttttatcaagcacctgctatctgtcaggtgtgctcccctatgtgatcctcacaactggcatgaacataattgactgcacaaagcggttggctgacttgctcattctcctgatgacccttataatcattcaagggaaaattttaattccaaagttcatgctcttttcactccaccatgccacctacaatggtgggaaacagtatttcacaactttgaactcctacaagacctgcatcgtaacactaatatttagtctttatcttaaatataaatacatatgtaatatacatttcatatattataattatgtatatattattttgtagattttatgaacaaaaacatttgggaaaagcaaggttcatgtgtaactcacatttttatcttctccagtatctagccgagtgtgatgcatacaatagatgctcaataaatatctgctggctgaaaaatctacctatagacagctctttctgaattgtttatggttcttggtataaaatggtgtgtattttacacaagggcaaatggctgtctctgcttctaatgttgagctgactcaaatgtagtatttaattgttaactcagcaatcgttaggcaattaatataatttgttatctgatagagtaggtgactggggagacatggaaaaatctccttctctcaggaccttacaagacattcctaaattgtcccctttttttgactctttcacattaagtattacaaataatcaggctagaagcactgtggaggctgggcatggtgccaactgctatgtagatcaacctttcatgagtgggctgtatacaagttcccataatgtaccctgtaaaattatgtagctgagggctatgcgttcttctggctttttaagagtaatttgtgaaagaaacacttccctcatcctctcttcctttactctgaatcctattctaaatttgaacatttaagaactttattgaatgtgacgtctccaaacaagttagaggataaagaagaaaaatgttttaaaacaaaatacattaaaaaaaaagtcctttgattttagcactgacccatacagacctcattctcaaattacttaaaggttttacctacgatgtcaggtcttacctgccattaaccagtcctttcagcatctttctccaaatatttttatgaatagagagcctatttatagtcgaatgcacattgtctagtgccaaagtttaaaatcaccttttaagtatcatgaaatagtgcatttttcctcattaaaaacatcttgatcctaatggacacaataaatgaggacatgagaaggaatagacatgaatttattaagaagtgaatgaggccgggtgcggtggctcatgcctgtaatcccagcactttgggaggctgaggcgggtggatcacgaggttaggagttcaagaccagcctggccaacatggtgaaaccccatctctactaaaaatagaaaaaattagccaggcacggtagcaggcgcctgtaatcccagctactcaggaggctgaggcaggagaattgcttgaacccgggaggcagaggttgcagtgagccgagatcacgccactgcactccatcctgggcgacagagtgagactccatctcaaaaaaaaaaaaaaaaaaagtgaatgaaatatgatttgaaaaagccagagtaaatttctcttttctttgactttgactttgaacaccatattccaagataaaacgtggtatgaggtcctcaaggacctatgcgaatttatctgcctttatgtacagattaaaaagtactaagtttgtcctaaattctaagatctgaaaaatcaagcaaatatcggctctagtgatctcaacagatgaacaaatgacaatgaatactgaagattttgaactagttttcctaataattatttggtttgtttctattagttttatgacaaccttctgttggctttgatttcagtatctataaaataacattggagagagagctatctcaaaatttttatgacttaaagaatttcttttttttttttttttttttgagatggagtctcgctctgttgtccaggatggctggagtgcagtggtgcgatctcggctaactgcaagctccgcctcccaggttcacgccactctcctgcctcagcctccccagcagctgagactacaggcgcccgccaccatgcccggctaatttttttgtatttttagtagagacggggtttcaccatgttagccagaatggtctcgatctcctgacctcgtgatccactcgcctcggcctcccaaagtgctaggattacaggcgtaagacaccacgcccagccagcgacttaaagaatttcttaagtgcaagataagcacatagctatcattaatagataatccttctttgatttactcagttatttatttagtgtcatccttgctccagagaggatataaggtggcttacttgaggtacacccaatatataatcctactggttcccagaggtgttgccacactacatgcataagtcaacacacaaaatagcacaagcacctataaaacctacaaaaaggaaagtagcatgttaagtccatgttattcccggtaagaaagttctgcttaatgatactagaaaggccccaaaagtttatatcataaaatttgcaaaaactgccctagcatttaacatgtcttcgtcatattaccagcagagaattccccacaaaactaccagccttcctgaactccaaaataagacattagtttggaactgacttagaagcaaaaatctgaattctagattgctatgttttccttggattttacccattctaggattagtcaagggattgagattgggaaatcttaaagatcatagtccaaagaatgtagacacacaaaataataaagcaagtcaaagctaatttccaaagattaccatccaatcaatcacacatttcctaaaagtagcagtggagtttttaattattaaaggtaaaaagagattcatgtctaagtcccaaaattaatggtttaccctcatttggtccacaagagttgtttgctataaccaagagaggacatttttagttctattgcttaggagggattaacttgttaaaaaaaaaaaaaaaaaaacaaagaagaagaagtgaatataaatatataacttctgactctatcataaacaaggcaaatgtgtatccctagaaaaatgaagtgcttagcgcttctcagccaaaattgcaatgccatgtccttgggtgctatctgagttgtagagcaccttcactccaaaaagattacggtgcccacccctgccacgtaacaaagaatgcaaacaaaacatttaagtcacaaatcgtttaaagaaataccataaaggctacttaaaagctctataaaataacaaatgacaaaaaattacttaaatattttataaaataatatcaaatattcctttccaaaaatgcgttgcctttgctgcttgtgcttaaatactaattccaacacagaaactcaaagtaagaactaaaggcctatctgtagatgtccatactatagtttgaagagctttagggtcacccttcagaagttctaagtcagtaagaaagtagtctcaaagtcagacattcaagcctgatgctggagaaaagccaagccagaggaggtgttaagtttgtgggtaggcatatgcatctgcacttataggatgatcggatgggattccaccttcaagtcaacagtggggaacagatttcaaagagcctatatctccaaaagggcttgaatttttgccatctcttcccaagctgttggggaataaacacaggaatagacggtagcaatttccatgggttgcacatctcccagtggaaaactaccagtgataagaaagtgttggtattcaaggtgatctttttcaaaagcttagcttgtatttggtataacaattcaagcagcaaagtgatttgattgtttcattgcttgtggtggtagactgaattttctcatacatggatcgtgccttctcaagacacaaaatctcaattttggagatttcatattttggccaaggcaagaatacagagataaaaagagcttcctaaagataaattatgtcctaaaataccaaatatgcttatacttaaaaaagaagcttttaatagaaagtataatttactccagttgactacaaaacaaaaaccttaataagttctagttgttcacatttaaaattagaaaacattttatattctaggtttaatttatttcgaagtattacaaaacaaactcttaagctcataaaaaattctttaataatctctatcattaagtccaaaatagaattccttaataagccttatggttgagttcatagtattataatacacaaggcatattaaagtcaatattttacattctggataattaaataaaattctaattatattccatttaagttgggtataatgtgtattttatattacattctggctctaaaaaaatagaatcaacgtacgatttacatatatacaattttcaactaatcataaaatgtatttatctgtagcatcccagtttcaggacacagtctcaaaaaggtttgagttccaaggaaaatttaaaagggaaaaaaattagaggtgttctaccttggttgtttttgtttgccatgttatatgcaaacagagaaataaagagatgctacatcgaatgcagcaaaaatgaaattttaaccaagcttcttgacaaatattgaaaaattgaatgatgttacataactattcaaggattatttattcagctcaagtagagaacagttttaggtgagtataattccttctgtacatgttcagaaatgaacttcaaacaataactgctttattagtttcaaatcaagctttcattcaaatgcagaaaacatatccgttgtttagtccgacttataatagctatcaactctttttctaccaaaggttcccctcttctcccacctcattctttgtaagatgagtaaggagacttttaaaaaatgtttggataaaattcattttgtctatcatgcaacacagggaaaatatcagttaattaaaaagaaaaaaatctttgtaaagttaaaagaccctataagttaatgaaatattctgaacttctgaaaatttttgacaaaatttattatattctaagtagcctttttggaaagataactaaaataatatcaatcctccattcacacacaacaaaataaaataaatttaactgggaattacattttaaattattctgtttttaatgttttgctctcaatgtacagtaatatttaaatgatttatgaagaaaatgaaaaatcaacttagcatacatttttaaacctgtgtttaattagaactttttatctttgaagtgtatactacttttgtcaacaatatgattttgtacaatacagaattaataaatatttggaaaaagataatttttctgaaataaaaaaacataggactcagaaaaatatagtctgttttgattttgcatttttacttgtatatctacttgctgtatctttctaaaatcattttaagacaaaattggtctgataaactttcttgcaattttggtgttcttctggtatttcagcctcatattagctaagcacgacttcaaggaagatcaaacgatggaggacctaaaaactaagtctacctgaggaaacttttcctattacttcatataaactttctggtttattttcaacgaaaggacagatgagattgtttggggaggtggggggcatgtgtagctggttcggggtttttgtgtttggttttgtttttgttagtttattcttagagcactcttttactaaagtcaccaatataattcacattcttttaataatgaaaaactgcttgtgctagttttatctcatgagaaaaaacactgttcctaaatcaaaagcaaaatgttgtatgttcagagctatatgaagacagccaagttataaaagcccattttcagatctggaacaacttctgaaaacaaagagggtatttgggataccttatgctaaagaaaaaaaaaatcctgctttcattatttcctgattctggagatccaataaaaactttatggaataaaaagtcttgcaaaaatccttcagtgaaaacacaaccaaccactcccacccccaacccccttctaaagtaatgagagttgataaactataattgcagtatggaaatttttacattttcttatgagttttaaaagaaagattaaaaggttcattggcttttcaaacagcaattattttagcacctaaaagatacacaactaaaatatatgcgtatttattttcaaagaaacaccaacaaaaattaaaacattggtgattaggtaaatactgatgacgccaatataaaagtatttgccactgcaaagggcctaagcacaatcacatcttgtcccgatcatacctgcctgccagaacaaaataggcagctgaccaattatggggtgtttatctatacagtggtacctttgttctccaacaatgtcagattgcaaatgtcctggaacacatatttacctggaggattcttggcaggatcattgtggcttggacttcctgattgtccagaatctgtaaagaaatcacagaaaatgttttctttttaatttgttttgaaagaatttcacaatcctcaaaggactcgaaaaaaaaatttgaaggtataaaaatgaagttgagtgcttaaataaaatacactttcccaagacttttgatagaaacattttactcatcaaactacatgaatgcatatacatatttctatgtcaaaagaaaaacacaagtattgatctataattttcttgggctagagcaaggtttttttgaaacaaaagatctggctacaaagccattgaagatggtttgaaggttaggcaaatattgaggcctgtcagtagcaatatgaaataaagcagatatattctcttaaaaatgcaatctaagtgtaattaaacgtgcatttaaaagcctgaaagtatgtttttattcaatgagtaaaatacacagaaatgagagtccgcttttccatgatttcacacacaagtacacatacccactccaataatctcccaacctactggatccaggcccagatttatctacatcccataatagcaatcgatttgcaaacagcaaggaaagcataaattactaggtagaaaccaacatggctttgtggagagcaaatggttgaatcaatttaatttccatccatgacagatggacagactttgcaggtaaggaggaagagatcaatgtcgtatatctgaatttcctaccccatactattcctcattgatgctacagaaagaaacgtggaagacatacaactgttaggcaacatgccctttcggactgatctgacactgttgtgttttgctcactcctcttccctccttgtaccctctccatttatctgtgtcatttgccccatattattatacacttacttgcgagttgctttgtaatcttcttttattggttctagcatttaagttttgtcgccccaactaaattgcatactcctaagcagaggcagagattctgtctacttcttttgtgtcctcctcagtgtgctgttcatggctgtgaatgcactaggcttgcagtaaacgccggaggaatggatggctcagctccagcagcctctttgcttgcctagaaaaggcaattttgaacttgataatgaatttcaacaaaatttgataggtggggcacaaatgacggctctgtcatgtactgccatatactgacaagtctcttcccccaaaccttgccattatacttgagccaagaaagtgatttggttaagcaggaaaatcatatgctggtttttttcatcggggttattctgtccttccaggtaagtgattaacatactgaaattgctgcttctactattaaatgcaagaacatcctgttagtttcttctcatataaaacctggttatttatttctgccctttgcctcatgcctgttagcttagatttaatgctgaaatcagaattttaccccttcatcccatttccttaattgtctttttggttttattctagaacagatttcatgagatcttggcaggcatatttagtgattcccacattttcctccaattgtttcctgatttttcaaaatgaaagtaaagaaactagaaatgaccattcttcatctggctcgagtctcctgaagacagtcagagagctgagaactctctgaaaatctctctcatctcccatgaagtcctcttattactttttctgaaatcaaggcaagattcagtgacttataaattaggagatcaatcttcttcgttctacattcctttaaaaaactggtacaatatgggccactttccaggcctggagtatgatagctacataaaaatgataaatcataactttttgctatagcatcagctatttttaccttgagttcctctgacaaatgtctctcagcattgatattacattccagtttaatttctcaagcgattctaacattttttaggaattcctacttatgtataatacacccactgaccagagcctccctatgttttactttccctccaaagctatctcactcttatgaaggtctagacatgcacccctcaaggtggctaatgccaagcttgtgatgacacctgagatagttaaagttgtcaattgttgcagcagtcgccttatttcaggagttgtagactctgcatgagccttagcatgtttagttacagcaacttcaaaatggtgccgcaaaactcttttccatcatctgttgctaaaatttgggtccagcagagaaaagaatgaaaagtctcttccattcgtaagaaactatccagctagaacaatggcatcccctgttaccacaacatcccacttgggaaactctattcttttctgctataaattactttttcttctcatttccaacaactgcagaccaacttcttcgattgaaaaaatatacttactaaaaaaaccacaagcatttgagggaaagctgaagtagaccctaaatttgaggcacacattggctttttgtaacaattccactttctaaaatgatctggtgtttactggcacacaatgacagactccttcatatgccaaagcccataccttctcatgaaataaagcagtgtatactgtgtctcagaaacataggagagggccctctcagtgagcaaatgatagagcatttacttttcagactgtaaattctaacactataatctactcttaactcttatgtcaccttatatcggtcacttaattccaactgctggaaaaggaagtaaccagggagtcgtggttggcagagaaaccaaaaatgaactgttattgtggttgacttcagagaaggaattattcagaccacatctaaaccccttccaattcaccacctaggtcaaattactctatacccaaaggttttatttaaccacttccatcactttgctcaacaccccccacctctctctctctctctctctctctctgtgtgtgtgtgtgtgtgtgtgtgtgtgtgtgtgtgtgtgtgtgtgtgtgtatttaatatgttacagtgaagcctggctctgtccctcactagtgacatgatcttgtacaaaattacttactcttaagagtcttggtgtctggatcttgaaaactgcaataatattatctaccttgtaaaatcattgcaagattctatcacattaagcaccaaaagcattgggtcagacacagtctacattatcagtaaataaaagatattaatattaagcatagagccacatttaaaatgattaatatatttaatggtttaaacatattaaaatgaaaaaattaatcatttttaatgtggctctatgcttaataacaactaacttttaggaagaaagggagaaaagggacataactaagttctgtccatcccaacacacgcatctgaaaatgactggtgggatgactaagcatggagaagtgtgtgcctacctgagaaatcctgtgtaaatgctttcacccctcattccccaaaagggaggagtccactgctcttcaaggctcttagcagctgtcatgctcaaaaggcagtagataccagccagttgatgaaaattaccttccagaaggctgaagtctttgaggaacaaggctgctaagagttgtgagctgcccagcatactgggtctggtgtctgggaaaaaaaattttttttttttttttgagacagagtcttgctctgtcacccaggctagagtgcagtagcactatcacagctcactgaagcctccacctcctgggttcaagccattcttgtgcttcagcctcccgagtagctaggactacaggcgcacaccaccacacccagctagtttttgtattttttggtagagacggggtttcaccatgttggtcaggctggtcttgaactcctggcctgaagcgatccgcctacctcggcctcccaaagtgctgggattacaggtgtgagccaccacacccagtttagtgtctggaaagattttgatgcagtagagaaaaagagaggagtttttggaggcagccaaccaaaaccagtcctccctcattctcttccacctctcattttatcttcctcgatctcaatctctattttccccattctttaagtgtgggtttcatgttccccattctttaagtgtgggttaaacatatgtttattcttctaaaaaaaaagtaatgaagttatttctaaattactatattttaaactcaatcagttccttcttctccaggttaaagattctccaggaacaagaaaaggttcacattcatgcacgacccttaccaacttttcaatcctttcgtccactccttttttaaaagcggtcaatctctcgtggctcttctaatatctaagcttacctaaggagtgagcagtttttcctatgacccaattttatggaagatcctaggacacataagtgatcaaacggcttgtccaaagttgcatagcaactattaaaacttatgttctctatatggacagcctattcagacacaatacttcttgaatcgttatgatgcaatcctaaaataatgcgaagctaaatgatttttcagtagtttaaatgtttctgggaaacttaccttcccctaacctccctcacccttcccaccattcaccaatacattcaaaatctttttcagaatctttttttaaacctttagctattttctatatctaagttggaagcaattattagtatcactgaactctatatactaattgacgttttaaagagaggccaattctataaatcaaatttgtctccattaagcaaaggaaattctaatgttttatggacaatctggtggaagctctgtaagatgtgtgttaaatatatatgacaataaataagtaatagcctgtaaagtatttcttactgagcactaactttctggagtagatacactgcaactatctgaggtagataaatcatcaaaactgtcaaattttttttgtaggtcattaatgtaaacatcatttaaatgtaaatcaattaagatttatgctcacgcctgtaaatcccagcacttttggaggctgaggcaggcagattacttgaggccaggagtttgagaccagcctggccaacgtggtgaaaccccgtctctaccaaaaaatacaaaaaagtagccaggtgcggtggcacacacctgtaatcccagctacttgagaggctgagacatgagaatcacttggacctgggaggtggaggttgcagtgagccaagatcggctcatgtattccaaacacctggtaatgtttggaacacagtaggtgctctgtaatgcttattaaatttatatttaatttacaataatgacctttaaatattgttttaaaaaaagtatactctatgccatgtagaagctcagaggctgcctgaagagacagaaatatacaaataaaaaaatacataaatcaagaggggacagatgattcttcctaggaaaggtgggcaagggcatatcataaaagatatcaaaagaaggtgaccttaggaacaatgccgtgaaaaaacgacctgatttcccacctttctaagacatatttcactcttttaccaagaagatctttataagacccaaaactgattaagctaaacatctgctaaaacctttacatatattctgaaaatagtatgccattcatggcaccttgatctggtccccatcagcacctgggtcatactttagcctttggactccttgtgtgtctcctgcatttgatgtctccaagtctgtgcataatgttcccccttttttctccctgaagtcccccagggtgaggtcatcccctttacatcctcaacaatatgacacgaagtctattattgccctatttagccttatagccctaatctttgggatagggcctggcacatttggttaagtcaaatgaacagaaaaccatcagtctataaactataaaagtgcacaagaaagaaagacaaagcataccgctctgtgtaaaatcatacagtagaagtcaaacagataaatttcttgtggcaagccagggaaacagacacacaattcccagggctaagtctctcagtctaatgtaaggctcaatcctacttcccaacttcctgaagaaatatttggaaacaagatagggtggataagacatactattttgagttagaaattattttttgtccatctcctataaagagaagaaatgtttgttgaaggtccatgtccctactttgcaagcactgaggcaagaaagttttaatgacctttatagataaactttctactcctagatgaaacttcttttaggaactctttttattctctgacaccatggcttgaggatcaacagaaaaagacaactggaaaagcataattttaatttataatgagtttggtgcaaagaaggagctgtacaaggtgagttttcaggtcccctgtggctctaaaattctatgattccataacaatatagcttttatatcaagggatatcagaggagtaaatgaaacccacaatgtaacctgttaacctacagatagcctcttgctagaactaaacttagtcatcctgtgataaagggcccttttgtcatagttctttgccttaagcaggtgaagaaatagcccattgtcaatgaaagaataccatgagattttttttaaggctcagaacagtctctttctttctctctaaaacattattaattgataatataataaaacagtatatttttacaattaaatatatagcatgccagaaacaagacgtaacaggtaagaaacaaaagcttgacggaaggaatacaaatgcatgtattttatagtagggaaataaaaaggtaaaacaaaaacatctatattattaagggtaatggagagcaaactattctccttgggccaaaccttcttctctcttcccctctctctgcccaaagttttctacctcactctttgcagtttactgtctcccatgactgattccttgggatttacagaacactagctttccataatcaagtttcctattacataatttggcttttttttttccagcacagttaaaacaccaggcagcttcagttttaatggaaggttgcttcattgctttgggtgacacaaaattatagttctacattattttattttctctctattagatgtgtattaaaataagacaacgaaagaacatgggaaaactgagtgttttccttgcctctcataagcatgtaaatgtttgggaaatggtttctctctctctctccctccttcattcttcgctcctgtgtgtgtgtgtgtgtgtgtatgtgtgtgtgtgtgtgtgtgtgtgtgtgtgtgtgtgtgtgtgtgtgcctgtgtctccctttatctcctgtctctctctgcttctgtctctctgtctcttttcaatagggcattaaattatttggagtccacttcactgcaaaacttaacttaacaagctgttcatgaaaagttttaactttatcactttgttaatggaatccctgatcttgtttgttgtttgtttgtttgtttttttagtgaatccgtactcctcctaaacccagttctgagcaataagagaaattagacctctctgaatattttggcagaaccaatataatatttgggagatgcagtttcctgcatattttaaactatttactatttcaagtatgaagacctatatcttcagatccctctttctgttgtttaacattgattttaaaatatacgtttgatttagcaaaacgcatagtttaaaaagatgttgctacacttaagatcttcatgataaagtaatttcattaaccaaagaaaactacagaacaagagagtagatatacgatatatcctgtttcattcctgaacatcccagttgttttatcattaagctttcttttaaagagccacttttttgcttaacaaggagattaggtacaaagagtcatatcccaaggattaaaataaggatttgttagcgctcaagactgaaatttgtccacagggaattaactgaaaaaataggccactgaaatttaaggtggaaaaaaaatcatattatcaaaaatcatatatcaaaaaaaatcaaagcaaatcattctaccacaggggactactaatgaatcccctgcaaatatgaaaccctgcacaaaaagtgttaaacctgccaacatctctgaccagagggctgtggtacttcattaagtagtaccaacccaccccccacaacaatgggaagctaggataatcatatctgacctttctgccctaacctaagattaagttcaatgacttcctactgatctagggattgagtgaaccaaaggtcataatcaggatcacctacagttcttgcttttgaaggctttaacctacagaatgcaaaaacaccgtactggtcattgtcaagattgctgactttctacagtgtgttttcaattaagtaaataaaatgtggtaattaaatcaagattgcataatatgtttttgatttgtaatcttatttaaattaattaactgactcaatccttgcttagtttttaaactggtcgagttagggaaagagtccctgggagcaaatccagttttctatctttaaaaacaaggcaaagcaatctggcatacttaaaaatatacattaaatgcaccagcataatataaatacagaggcaagggtgctaatgtagaggagggaagagttttatggcacgattttgactaaaagaaatagctctcgcactagagagaaataaactaaaacattatttattcaaaacatttcttttcgaattttatgaagattgcatatttgttggaagcaaaacatttccagctgtattttaagtttctgaagagggttgtaagatttataatctttcataaatgctgcccatatcttataatattagatgaacacgccactgcgtactttgaggaacaatttgccaacgcagtttgccacatgaaaataataaagtcctttccaaaacccagccagatccagtaggaaaagatgagatgaatgttctttcttttccatctgggagacattttggatttcagctatactatgtaatatacattttttccccttggaaaccaagaaacctgcattttacaacaaggtatgtagtgcaaagaaaatgctggtgaaataagaatctgaaaatgaaaaccagaatgtcatcagactcaagaacataatcatgaaggcaaatcgaaaaatcaatgcagaatttcaacataaaacaaatgcaatgtttatgatcctattagtcttaaatttttctcttaaaaggaaagcatagaaaaataagtgctgttttacctccaaagtcctgaacagcatttatgttactacctagcaccatgacttacatatctggtttatcctggagtcttcacgcattattctaaatcccacacatacaacactcctgtgtacacatggcccctctgtgctatgtcacttcatgtattttcccaacacttaatatatctaggttaaaatcagacataagactttctaatatttcattggcaatctttcttctcagggagcaggacatgttctctccaaactgcctggagagtcaggactctgggctctatccggcaactgccaagcactagcacgctgactctaagcaaaccatttcacgcacgaatcagttttcatcttgcccagtggcaactagttaatgaaaggtaagagtttagtcttagttgttttcaaaggaattagaaatactaggaaaaaaataatttcacacaacagtgaaatatgcacaagtatttttgtggaaaaaggctatgagatatatatatttaatgttctttaaggtttaattagtactcctcctccccctcctaaaaaaaaaaaaatccccacctacttggttgcactgccccttgcaaacgctgacaacacaggtaattgaagggctgggttagagtgcaactcttctgctacattttaaaacccatggggtcaagaaacatgttagtcttattcactgccctagcatattcctggcacatactagatgctcaatcagtatgtgttgaatgactaaccactgttttacagagaacaagatgatgactggtagcagttaaaacagttcatcttccttaaattacaaacaaactgccagtaataccaatcataactttcagtttttgattattatctacacatattctaatttttaagtttctacaacctctctacaaatacaaatgtagtgattgactcaatgaccaaaaagtcatattcttattttttcattgctcattttttcataggcatatgttcctaaaaaattttttaaattggatacagatttctctatcatgttagctaaaaagatactttgccaaatcattaaaatgtttatgtttatatccttatgtgagcttagagagaagaaactggatgggttttttatatcttatgttacttacatgtgattaataaccagtccttgttttattattaaattatggctcttaagtctgtgatactatattcatataaaaataaatgtatacatttaaactcaagatgcatagcaattaactggataacagagtaagatgatgcatagcctactttctacaaaggtaaagtagatttgtacgtggggtattcattactgcttctgttcataaaataactttatcaaaatattagaggaaaaaaatcagataagtcatctgatgaacaggaagcttgctgatgtggcagataatagtattaaatgtcctaacagttccttgataagtggttcaaagaacttctgtccccatgttttcaaggcaaaagttaatataccaggaataaaactacttgaataatgcatcattgaaccaacatttttgaaaagggataaaatgaggaaacaaatgaggagacagtaatttcctcttgcaaattaaaactgtgcaggcaaagaaaggaactcaattatactgataaaataaaaacaaaaaaatagctgacatgattttcctttttgtaaaaagagaaggtcaagaatattctaataagtgaaataatgggtttgaaagaactttgaaaagtttacaagctcacagagacatgaagatggggcattttatggggcaatattctttcaaacagtcacttaaagagaacagtttaaaatacagataatcctggccaggcacggtggcatatgcctttaatcccaacactatgggaggctgaggtgggtggataacctgaggtcaggagttcaagaccagcctggccaacataatgaaattccatctctactaaaaatacaataattagctgggcgtagtggtgggtgcctgtagtcccagctacttgggaggctgaagtgggaggatcacctgaggtcaggagttcgagaccagcctggccaacatggtgaaactccacctctactaaaaatacaataattagctgggcatagcggtgggtgcctatagtcccaactactcgagaggctaaggtgggaggatcatctgagccctggaggttgaggctgcagtgagctgagattacatcactgcactccagcctcggtgacagagtgagcccctatcttgaaaaaaataaacaaaaataaaaaaaatacagataattctaaccaagaataataaagaataacagaagcccaccatgaaatctactactcatcactatggttatttgggaaatgggaaaataaatgatgacgggcatgttcacttgctatatccattttaaaaaagggaactgagagtatactggtgcagagctatgtaccaggtgctcaaaattcctcccattttgtcttgttactcattttatctttaatagagattcaaatcaattccttatgattcaaaaatgcctaagccaaatccaaagagtatgaaaaaatcaaggttctgcataatgtcccatccatatgccttaaccctgaatgatatcaaacctatgtaatcttagacatcaatgccttccagatgtgacaaaattttaacacagaccaacttcaagctttttactgcagactcatctcccatgctcataaagattattttcattgcacgtaccattacatatggctaatgtttaattttccaaattgattattatgctgccatttcaaaactgacattgccttccaatccaatcaaaaaacaaactatgctgcatactcaacctccaacaaacacatacacaaaaacaagaaatcacatcattatttccaagttctagatagtgcttggttacaagaccagttgaacttttccttgtccactcttggtacctccaaaagatggaaaaggggaaggagggatcatccaattctttgtcagagttaattgccataggaataatttgagcctgtcacctgttgtttttggtcttaaagattgcttctaatcagacaagatcaaattcttcttgacatttaaagcatgttaaaattctaaaattaactaacaagattgttcatggatattttgcaaaaccatctaacagcaaggccatgacagaaatgtataaactaaattttcagataggatttaaaaaattagtaactcaacaccagtaagaaaaactggtgtgataaagctttggatgatattatgcaaacttaattcccctgccccaaacaattgctttgaatcttacctaaatctcatccctccacccacccccaaaattagaattgccctgtaacggtaacttgtcctcagatccatcctgaactctgtttctgcaaaccacctttcccagctccattaactattgacttcaggctaggtccaaccaacaggaggcaatggtaggagtttgggaatttggagggtgggaagaaaggagaaggagaggtattccttccctcctctgctttgacatttgtctccaaacagtggtgagttttcctcttgtgattcttgcttccactgaacaagttcctccctctgtgatgccctcccttcaggcagctccagctcaatttgtgtagtagattcctactgatgctaatgactgggtgacctcactgcccattcagcttttcatctattctaacattactgtaactggccttgcccatgaaattcctcctattggactatctggtagtttattttactcaaatctgacagatacatttgtttttttgaatttggcatatctgtcactctaaaatacgtgtcaggtaatagaattaagcagtattagacaaatataataacttttttaaaaaccaatagatttcacgtgtttgttatgattctcatcttttaaaaaaaagatgagaaagcactgccaccattcagtactaagtacaaaattctgtatcccaaagttttttgtaatgcatactgatacataaaaataatcaagtttttaaaaaaggcaactagatgctcaatgccatgttctaaatatatctcttccaggaggtcttctgataatcctacccatccatccaagtttacttcttctttttatcatctcctagtctctctaaccaatttttaacaagttttttcttgtgcatgtgtttttccttcacacatgactgtatgctccttgactggaacaattataagtttgattatttttgtaaaatatgatacatttacttatatttcatgccacaaacaacttcgaaatgcttatcaattgtcggaataactaacagtctcatggggataatcaaaaggttttcttaaatatgcaccactatacatcaacgtaagaataatccctaacaggaaagagaaatgacttcaacattactctgtttcctttaggaaatggttcataagtccccactggacatgaggcattttacataagaaaaattacaaaataagacaaaagtatttttcccatcagaatagtaacactctatagtgttttgctaaaacactctacgaacaggagaaaacaaaaatatttatgttcatacgcacagggatatatatgaactcacagtaccaaaactttagaatcacatatgcaaacagtaccaatatacttaatgttttaaactgtgctagataacagcccggctagaggcaagtgacataacggaaaaacatacagcatcaattcacatgttgccaactttttttggatagaactaacaggatgacactggtgatggatgtgcacacttagctgccagcattgcaccctatgcaatgtccctctacatcctctctctcaatcattttgaacccccacccccaagatttattttatgtctctttttaaaacattattttcctagttggtgacagtcaccaccaaacatcatacagagatcatttcaactgaaaatacatgtttattattttttaagcctgtgcctgaaatgtattttagtcaatctatgccacataaggcaaacttctaatgcacatttatgaatttaattcaataaatatttactgaaaaaagaaaatgggttggagtctaaatagacataaagtggccatgaagtaagtctagcaataactttcactttttatgttttcccaccaccctttactttccccaatgagaaacttatagtgtgacaggtaagctaagagacaatctccataaatatgacagcagacatattgcacagacactaaaaaccataggaataatgctgagaccacaagacagaaatagcccttgactttttctcgtaatggcaggtagaatgggtgggacagggagcctaaagccagataggaaaacgaatccaacttttaaccaaattttttattacacacatactatttgaaacttaaactttcattctaagttacagtcaaaaaagaaaaaagacaataagaagaaataaaaattatcccagttcttccaatgtactgtatatgtatatgctatgatttaagaattatgccataggaatagataattcaattaaagccaagataaaacaaatgagatacattatactaagcagatagcaaattatgatataatttggctgagaaataggttgaaacaggcactatcttagaaatgggatgacagcaaagaactaagctccaccttcaatgtatttgaaggtctgtttggagccaatttacacaaaatatccacttaccaatttcacagaagatagaacaaaataacactgagataacgtattaggaaattattttttaatattggaggtgcactctaccacctcaatccagcacacattctctctctctctctctttcacaaaagagaaagagatcccgtaagcttctccacaatgttctatacctgaccctggaaggaaatcctattcttctaggcttgcttaagccaataaggtccccagagaatgctaactggggtggttatgtgcccaagaattgaactgaaaccattaatttacttcataggaccaatcaactggcaaaagaagttaaaaaaaaacaaaaaacaaaaaacttttggtagaactgacctacagagaatttaaaccgccagagatggcaaggtttgatgttacagcttccttcatccatctgcaaagctctgtcactacctaataaatgcacaatgcttctctctcctgtggtgcttttaggaaataatgcttgtcattttccatcttattgacaaaatattgtattttttagaaaactccatatctaaggaatactttaatgaaataaagatgggttaaaacatcaagctaattttgtgagcacacgaaacagagaaataatctcaaagaaaatgataaattctaatttttatttgaaagtataaagcacatatgagacgacttttattgtgttgccacttcattcttgtttatttaggtttctttattcactgtcgatataaatgactgcagtgaagccaggattgcagaccaaatctgaatttggaagtttggctacagcaatctggatcccaaagccaaagcttcctcctcacattagactcccattcaaagctatcactgtgttttcaaagtgacaacactgttcaactttcttttcacagagcaggaatcttttatggcattaagggtatgtatgtcacaccatgaaaaacacaatgacattgcaaacatagacaaaggaatctagtaagggcattgggaggaaaaagggggtggggtatttaagaaaatgttttttaaacttttttttttgcaaaagaaaatgcataataataaaataataactgaaagttccctattaatatcatccagcaattattaaaaatagaataaattagctgatatgatccaatcacctggtagggaacagcatgtgtctccttagtccattggcagtgctaatggtgctcctaaatgaaggattttttttttctatgttcacgctggttgaacttaattttccgttcacctgtttacctggattagttttcagcttaacattcattaagcatcaagacataacaagaggtgcagtgatgatgagataaaagtctcaaggccattactcctcccatgaggcactcagggaggatctataagtgaaagatagcttcactcgcttgggttaaagtgaaaaaatatgaacccactctagaactttgaaaatcaaagagagctttaaaaagccgtgtgtttatgttttgcctaatttttcactttttctcattagaaggcaaggtctgactaaatgtgggttatttctgatatctcagcttctagtttgcggaagggggttcctgtttaagggagggaatgctgccaccccctactctccccagcagcagcacactggacacctgagaagccaaaagcgctacaccaaaatataccacctttaatcacaaatcaaacaacagtaattaggagcatcaagttaattgtgtctactccccacagaatgtgtcctccaaggctccttgaaatcaggttgaaagattagtagtaattttactcccaattctcttattctaacttaaaaaaaaaaaaaaaaacagagcctaagttcatcactcctaccctcagaactatggagtctacaagtaaaaccttaaaaagaaaaatcagactacttaattaagtgttttcttaggccgtttatgtaatcagagtaactttgatctttggcttcttaatctgttcaaaatttgttgtcaaatcgtatggaattcctttaaatccagaattataaatgttattttccatttgtcttttattaatgattaagacaacttggcagtttgaatccaatcaatcaagaatgtgcaaaatccatttcatatacattggtacaattagatactgacaataaggctctttcttaccttccatttgtactaaatatgataaagatagcaagaataccttagctattttcgaggcattttcatctacattactttgcaatcccgaaataggttgtgctttattctgaccctttacaattaccagaaaggaatgcagagcttgacaacttgcagagtaatagaaaaaccttgatttttcattgcatttccccttctgactttcttaggatctgagggacgacccttaacctttctcagtctcactctcctgtctcaaacaagctataataaaactttattccagtccactggggtattagaacaatgaatctgataggatgtccctaacacactgtactgtgatctctatagggaaagttgctataaaaataaagacactgttgttattcttccaattgagttatttgcaaatggatcttcttgatggagcccagccctccgatatagaaaagaaaattctatcagtcctctagggtacaattgccttgtggcaattatacccataaccacatttccttattactatttataaaagactgtggagttcaaggggaggcaaaaagggagcttaagaaaaaatatgctgtttattttcaacagaagatgctgaagttgcaaatttggaactcaaggctataggtaaactttgacagaacatgtgttccaaattagtgtggtgtttcttagctgtgtcagaaagtcagaggtgtccctgaggctgcagcgctttagcaaattttggaaataacttggggaaaaaaaaggtaaattacacagttaatctggtcctcactctacgaatgctacaaaacaatgacgaaaaggttcacggctagaccattctcaccaagaaagacagcatatctcgaggtacaaaaggcacaaaagaaaattaaactgagcttaggaagaaagtgctatggacaattttacatgaaaagccaaaagggaatgttggggctacgttgaactttcctggagtctacagacagaatacacgttgccccctatattcattaccaacagccataagaattagtaggtggctcaggtttaggcactttaagaattccatattcctcaaatggaattttttcaaagtaaataataaaagctttgctttatgaagtattagagaaatggggtttcccttccataacagaaatcactaggcccatcacactgcacgtctccaaggagcatgattcacagtgtgggctacggggagggagccttctaaagtcgtttcggatgttcactatggcattctacgtgtcattaaaaaagccttataaatcatcctaaaatttagagtttaaacctggaacaattacttggataaagtttcttatgttaacaggtttttaaaagttcaattttcagaaaagtgtttgttgtcagtggagatctgcatataatctagattccaattaaacacagagctccaaaaagaccaattaaaggagaagtagaacagcttgccgtatcatgacaataaatgctacttgccttattgtcatttcacaatcagtgacattcagtccacaaattctagtgagcatcagattcacctgagatgcttgttagaaattcagattcctcgacctcacccgcaatgactgggactcgtacagcaatgctggggccaagaaagcgctctcaacaagcaccccaggtaactcccgcacattgttctcagccagtgtacaagggacttggctgctgatgcttgctcacagacaccaaactggaaagcaaaaggcagtatgtgactatagagtcctgaaaacacaaacaaacaaaaatgcagtccttaagccaaaaccaatctccacttttctccctctccctgccatgtgatgcaccagctttggccaaaaatcacatgtgtacagtgaatcctaaaaagcaactaaatccaaatccacactgaaccattctgaactctatcacacttcacagagctttaaatagaattctactcaaaacatcacaccctgactggccaagggattctttgggttctgttgctttatccaagtgatccaaagtgacccaggttccattctgcaagttcgcttctacagctttttccaagtcgaacacagaaggattaaaaagaaaacacaaatattggcataggtgacttgaggttacttgacctttctgaaggaagattttttggcaattgtgttctggcagctccctggaaggcaaggccaggacacaaagaggaagacaggaagccgggagctggccatgtgtccttggcaggcagtagtgcggcagggtgaaccacctcatccctgccaaaccagaaacagtggggaaagcccagctaattggcaactcacagccggctacagtgtacatcctcggctttagatgcctgataaagttaaatggcctgccagaccctaatctacttaaacaggatcctcctttactttcaaaaacttaactcacccatttgtgtttccttaaggaagtggtaaggcagcatcttagaatgttaagagctggaaaaattaaaaacaaaacagcaaaaaaagtaaagatgtgttggagtctcattatgcttatagccgttttactttgtgaaagggccatgtatgtttgtgcttttggttttagctaataagacttccacttggtcatttatttttatttaaaagaaattctcaagtcaacattgcagactgattatgacttcagttcattggaggatccaggatccattttttttttaatttcacaaaactcctgaagatatccaaggagactgcagagttgcacccagtttccactcagctattgtttttacttacacattagttggctcaatcatatttgctaaggtatttctgtatgtactagcataaaatcaccactttctgagtcttttacagctaaaatagggaatcacgcagggagaacaggagcagaagggattgtccaaataaactgttccttactgctgctgctaacagagtgaatccagggacctggagcctggagcataattttgcccctaggtctgaaggcctggtaagagcaatttaaaggggtgtgctcagtagttgggcatatttccttctattttctgtgaaactgttcatgccttcttcaaaactcaaagcaaaatttcaaattagcttctcctccttaaaatatagtagtcaatggtgaaatttgatgaagaaaatgcaaatttcctctcagaactggtagaagagaaagattacaataaacataatccactgttttcatcagaagtttcttaaagtctacagaatattcatcctttaagcaacccaggaccccagaatctgtttcagtgaagttagaccaaggaataaaacacaataccaaaactcacatactctctgatcacgatgtgagataagaaaataataatcctcatgcccaacactagctctcaggatcggtaagtctaagtatgtgtttcagctccaaaattactattttttttaaaacacgacttgactttcccagactctacttagttgacttttcacactaagtatccctagcttttggaaattctccttcccttttcctttagggcaccactcctttcttaggtccaatcctctatttctgagggctgctttcctgtcttgatggctatctccttctcttctgttggtcccttatatgttggtgatcccaaagacgatccatccaacttggccatcttcttgtctttgtacattccccctcagcaaactcagctaggtccatgtttacaaatactacccgttttttgagaactctgtatctccatatctagccctaacctcttctttaactgcaaaactcctcctgatgttgctagtgcacaacctttgtacactcttgcctccccgcaaccaatccatatctcaattaatggcattcacagccattcagtttcccaagctgaaaatgctcattccagaaaccccaactccccaaagcttcacattcagttgtcagcccagactctatcttcctttcaagcctatttccccatctccatcccaactggtgctaagtcccttattgagcttcacatttttacctcacaatagcctcagcctcctcaggccattatgattcactcttcacactataaccagactccatcctctgcatagccaccaggaatcacaacacttcactccttaaaacaccttggtggcttccaattgctagctaggataatctacaacctccttagtacagcattcaaggtgctccataacctggccccagcctagcctcactctcacagaaaccatcaccctttaccctccccctcacacccacacccaacttcctaatattcttcttaacagtcctagaatatgccgtgcaactgcaggtctgtgcccttgctcataaggtttctatgcctggaatatcccttatttgatgcaagacaaacgcctaattcatctttaaaagctcttgaatttcgtctgttacaaccttcctgaaccttattgccccatctaatgagaccaccctctggggcccacatggtcttgctcacactttagtgcagggcccgaccagtgcattatagttggttgtttatacattacttctctccaagattgtgacctcctgtatcccaacttaccctgaataattttgggaatctatttaaatggcatacaaatttatcttggatgtactatccatgaagaaactgagacaaagagcattaattcccaaaagaaagacaaagtaaccttaaaaaaaaaaagtcataatgagctatcaatttatacaggtaattaacattcaatattctgattgtgacatatacagatgatatttatccattcgtttatttttttgaaaaggactgaacacctacagtggtccatgtatcatccttggaactcagtctacaacagtcaataaaagatgatttgttcttgtcttcatggagcttatggtttcatttgcacaatgttgactttcattcacttgctagcaggtaaaatgtgctctctatacaatttacaaataagcagaatctgtaatcattatattttgaagataaaattgatacttttcacacacacacacacacacacacacacacacacacaaagatttagcagtgggacaaactttttcatttaatttttgtttatagcaactaaaacatgagagactaaaagccacagactgcaaaagcattgtttagctgtgataagcagaatgtgtaaaggtggtatgatggcacaacagctattgcagcatgaaataatgagactataaaataatgagaccacagttttaaaattctccgacttccattatctttcagaatagatgaaaggggtctactgactagttcgggagctgaagagtcaaatactattttaggatgaaaattactttgtggtcacatcccattatagaatattgatggagccacactacatgaaagtctcaaaaggagtactgagagaaaacatcgttaagaattggttttctgctactcaaacccatcctcaagaaaaaacaaaagctaatttaaaaaaatcatcaccaaagcaaagtttctaaatggaatgacataaaaatatcggttctacgtttcttgtcttttagaaaaacgacccatatgtgtagtattttatatggttttctctaacgtatctgagaaatgggtaagcaaatctatgcaaagagatatcatggattgtgatgtcatatttcttatgaaaaaaatcaccttcacaatgtcaattaataccaaatttagctttacaactccatgaactctaccattttttaggttagctgaaaacgatctattgactagctttgtgagctgaacagttgaatgctacttacatagaaaattatttctttcactccataagaataattatcatggcgatcacacaattattacaattacatctgtaagaactgttactgggaatttatctctgaaacagtctcatgccttgcaggggacatttatctttttgaatgatcatcaacacgagtgtctttttgtagctatataagtgatttttacctccttctattaatatcctcttgcatgctttagaagccaaaggagacagcccccacattttttttttcctaaagcaattgtttcagttaagccaggcccatggcatcttttgagacagaaagctaccctttccattcacggcaacataacattcacaatgtgctttcctaaatggatggaaaacccctcaaaaaagcccctcaaatctgtgtttcataaactgtactcttagcaataaagtttattacagacctaaagtatctgcataaacccggttaattgaaaagtgggtggagaaggctgccaaattaaatgtttacattagcacagctgtattgtaaaaacattctgccccctgtgctttgtaattataagatatttctggactgtgtatctctacaaagtttatctccactgccaagagtgtcttggcacggagcgactgcagtttttggcagccaggagctctccgcgcgggcaggatctaaaatggctgccaagcggcctcctgaaatgtcgccggcctgggcccgcctcaccaagggcaaaggccaaccctgctaccaaggcagggtctaaagtctgtctcacaggaagtcaaaatgtgtatttccctcataaataagacttggtaccacaacttttgtgttgcagtagttaaagctgcttgaaaaactaactacaaaggaatattggaatactaccagatagaaaatggtgacaaggggtcttttacgaaattctgctgacctcaacatttcaatcacacataatgcccgcaatattttctgctgattaaagaaactcatttaatttgtggggaaaaaaaaatgttaaaaaaaacctcaacaaattctgaccatattaaaacatactacagagaagcataagcaaagccaacactttcccatttgcaatggcatgattttgacataaacttataatctctatcaaagcatacgtgtatgaaaaatgaaaaccaaaaaattaatttgttttcttctcatcctttaacaggctatgtttgtcttacaacattaaaataacattaacaaaagaaaaccttttcatacctttctatggcacaggcctcaaaatttgaggaatgatctctcttttcccgccgtccactgcccaagatgtggaaaggaaagaaggccaaggggaagaaggtggctccggcccctgctgtcttgaagaagcaggaggccaagaaagtggtcaaccccctgtttgagaaaaggcctaagaattttggcattagacaggacatccagcccaaaagagacctcgcccgctttgtgaaatggccccgctatagcaggttgcagcggcagagagtcatcctctataagcgactgaaaatgcctcctgcgattaaccagttcacccaggacctggaccaccaaacagctactcagctgcttaagctgccccacaagtacagaccagagacaaagcaagagaagaagcagaggctgttggcccgggcggagaagaaagcgccggcaaaggggacctccccactaagaacacctgtccttcaagcaggagttaacaccatcaccaccttggtgtagaataagaaagctcagttggtggtgattgcatacaacatggatcccatcgagctggttgtgttcctgcctgccctgtgtcgtaaaatgggggtcccttactgcaatatcaaggggaagacaagactgggacatctaatccacaggaagacctgcaccactgctgccttcatacaggttaactcagaagacaaaggggctttggttaagctggtggtagctatcagaaccaattacaacgacagagccaatgagatccgtcatcactggggaggcaatgtcctgggtcccaagcctgtggcttacattgccaagctcaaaaggcaaaagctaaagaacttgccaccaaactgggttaaatgtacactgttgagttttctgtacataaaaataatacaaatttcccttcaaaaaacatctgaggaattaactatgtctgtggcataaaactgaaaaaaaccgagatcagatacatagtctctgtgagtgagttccaagggctgaccaaaggaacaaaaattggaaggaagggaggggaggggagggggaaaaaagaagggaggaaggaagggggagggaaagcagggtgggagggagggaaagaagaaaggaaggggaatgaaaacgtgggagggaggaaatgatggagacactgcatggaactaaaaatacatactgatttgttcatagtaggaatataaaaaacacttgaagaattaaaaatacttcataagtacaccttcataagtacgatatatacacaaggtatatattgtctctgtcctttttttctctgttaaacttaaatcccagctaacaggctatgttcacagcagccaaatactgcataatgaggtcagtggatttttctttgagactgttccgcaagtttaagctcaggttgagagacacattaggcctggtgtactcctgtaatcatcattggcagtgattactgtttggtaatctaagcttcaactgaatccaacattcttgcctctgctgaaagataattcagaggtgaaagatgaattccataatgctgacacaaactggtggtattcatcatagtgcttattcactgaatgcccattctagcttgaattatatgtccacacactcagcagagccacaccaatattgtttacttaatttttttaagtctccattttaggagaagaaaatctaatgtctctttaatcgtatattttgaataatgtctattctccagtagtcacctgaaaaacacacacacacacacacacacacacttttcctggacctttttacagcagaataatttctcagcattattaattatgtttctgcgtaaaagacatttagggacttttatcctttgtttaattagttatcaaaataatcagtcacacagctatttaataatgggccactcttaacagacaggtgaaacagagtggttgtgttcaaaaaatatttctagttcactagtaacttactaactctctctctcttttttttttttttcttctttgagatggaatctcactctgccactcaggtgcagtggtatgatctcggctcactcgcaacctccgcctcccaaggttcaaacaatcctcccacctcggcctcttgagtatctaggaccacagatgcacctggctaatttttttgtatttttggtagagacagggtttcaccatgctgcccaggctggtctcaaactcctgagctcaagcaatcttcctgcctcggcctcgcaaactgctgggattacaggtgtgagccaagcacctggcccttactaacactcttaaaacttgagctaatttctttcctttcatgagattttatggtctgacactgctgacttattaccttttcttccttgagagtttccaaatactaaaacaacaatctgctcaacaaacagaagaattcgataaatgttgattgaccatctagtacctgcaaagagaccctatgctatcatatacagagttatgagattcagacaacatgctttacaaaaaaaaaaaaaaaaaaaaaaaaaacctaagggatggtttcagattttgcctgtgtcttagtttcagtcatgtttggtatatattgccaagtagctatattttatatccccaactagaatacaagtttttggagatcatgctctatgtcttactgactgcacaagacagtgcaacgcatataaaattgtcacctacaaatgaaaggattccagtgaggctaaatggtgattagctgtgtaaaaccccactattccatacattgtatgtgcttacaatgttagcttatcctcctcttagcagcaaatatcttctaggtgaacagtaataaaataatagtaaggctaacagtcattgagtatttgtttacatgtccaatactgttctcaatattacggtatccatagatttcgtccttgcgataacactaagggatgctattattattcccattttcagatgagaaaacttgcctaaggctatccaactaataactgaaaaagccaggaattaaacccaagccaaactgaccccagaatccaaactaaattactgtcttcccaaattagaggtgtcaccactggacagaaaaagagatacagtccaggtagaggttgcacctctgcaattacagggctccttagtcaattttttctaatttttgacacataccttcccaattttcctggcaaaagcctcccttgagtggaggccactgactgtggggagtttatgttgtggtttggtaatgtgtacaaactgggaggaggatgagaccagaaaaccccttttgcccatagcatgccacaaattgaggactaagtcagtgcatgctgctgacaggcaaagggccagctcggcatgagcagctccgtgcagggactgcatgtgacaccagacaccattttcaaagccactaccttcctccttccccacaaacctcttcatctcccaccaaagtcctgaagcttcaccacaggatcaagtaatccccctctaagccacatctcgtaaatgagagtctaatttctcccacgtgtcatttttcacatgaatgttactacggtcttggctgtacttaaccagagttcaaggtctgatggtttatctacagagacaacatgaccacagagaagagcccgtttccattgccacctgaaagacagatccaccaacacaatgttcaccactttctcacacagggctaaatgagactcaaggaaagagcccaaggtcaaacatttccttggttgaatttaggtggtgggttcccatacagagcacagcaccatcagattcacaaggccaaatgcctcagcatgatgacttgaaaagatgacaagctgcacacaatgttcaaaatctaaattcaaaggtcacttcccactccctaaatagttttataccccaaaagtcattttagaatcatctttccacttttattccatatttgtaatctgattttaatgacctcagggtaggccatttttttaaactccagacaggttctaattcatctatacaacaaagcaatacgtggtgttaaaaaaaagactaagagagtaaatcgatacgtgttcagtgtagtggcagtttagattttttttctttcaattggcaatccttccgacatcaaggttaaattgtactaaaaaagaaaaaaattacacctcattccaaatttgctaattcaagaagaactgaattattctcacgtctacttgtggcaaaacaagaaattactttatgtctcaaatgtgagtatgaattacgactaaattcataaaaacagacgtgacttaagtttttattttactactttgaagttgtaatgtgttcattttcctggtatttttacttaaaagagcttttttttttttttccttaaggactcttcacaagtacttttgatagagtggtataaaattatcctattccaatgaccataatatgaaaatcattttgccaaaaaacatcctggaagtttccctcattttaggtacttgggattattctcataaactgaggaccattcaacaatgttttgaagatatacagtattctattcagaggacaaagcatatattcaaaaaaatgcaaaaatattcatcttttctcaaacaactccagtattaaattcatctagacccactgattcactcagtcttttttttaagtttagtttccaatatgatattatttctgccctcatctcttccttgcaacaccccacccataagggaaaagaagaaacagtcagagatgaaagaacaacaaaaatgtacacaaaaatgaaatgttttctgataagtagcatgtcagagtaaacaagttatttttttccactatcactttcttacatgatctacagcaaaattatgttgcctctgtcttatgaatcatcaatacatcacagcccagcctttttcatatatagtgggaaaaatgctgcagattataactactgtttctgacatggagatatttttaattcatttttatgacatgcttatgttcttttcatcactgaataattgctcgtttccaatactaagctggtatttctttaaagttcacgtaattgcactactggtaactttaggatttggaaggaaaaggatcacaatcgataagcaaatgcaatgacgggcactgacaaagactcaacatttattagaaggcaattgctagagaatgtggctttaattgtgcatacatatttttattcattaagatgaataaccaataaaatcccacactatggtgtcccagcctcataacacattaataaagtttcttaaaggttttggcagggggccagcacagtccattaactctttgcaagttgtaaaaagaagtaaagtcatttcagtttgttttgtggttatgaatgaaacagcaggcagcctgtatggaaacgtcactttggatatggtattggtaatggacgctttgctgcgcaatcagaacagtgtggggagaagttaatgcatcctaccacaacccaagcccagacgcactgaaaagctaatttacttaaaagtggagggaaaagagcagaggactacaagtttggaagatctatttattttgctaataggctgtcacactgcctctgggtaaacttgcccactgtgaaacccaaaagtacaggatacattttaaatgactagaactgcttttcctgattatttttttttttcctaaaaaaaacctggttgcttaggcattcacttggtgagggctggatcataaattacaaaaatgctttttatttaatacaagaagcaaaattctatcctttctacgtttttgttttacatacttgaattaagtcatataaataactacaacaattggtagctatgtatttgtctccgactttgcctaacaatttgaattgaagcgctacacatctccccaaagctttacaatgccatctgttctcatttttcatgacactacaaacattttcctttggaaaaaggattctgtattttgcttcctttttagaatgaaaactggaaaacttgaatgaaactaaatatatagagaggcatccaagttgtacgtgtaaagtagtaaatgtagagggtatttaaaacattttttgtggttaagatctctacccttttcatctgttccactctagagataaaagttcttttttactttaagatttttgcaaaaaataattcaaaactttaaaaataacgaaaaatgaacttaaaaagtgattaaaacccttgagtttgagaacaccaaaaaaaacagaattgctttacaaattgtttttggcacttcacttacgaagaaaatacgctaaaatgtaagtatacatacacacatgtgcacactcacacaaacacacacccacacccctccattaatccctaaccaaatataaatagcatcgttagtcaattacttctgatggttaaaaccacaaattggttacaatgatctgtcactttatatggccaaataataaaacttcaagcagaagagatgattactataagtacaatagaaaacatcattcactgttttaatttgttttgaatttttactggaaaaaaacagaaagaaaatttttaactttcaaatgtaaacattcatcactgagtcctaaaaaaacttcccatttcaaatttcatttgtgtcagtgctaatatgtatcaaaatagccgcatctcttgtacactgtggattttctgggaagttactcacctttgattataggaaagtaaaggaaagtctaattaataggttgaaaccgtactgaatttctgcttctctgtatacatgatcatttttgtctctgtttggactgaaagccagatactcaacaatcattccctaaaaatttaaagtattaattacatacatgtatttgtacaatgttaagtatcactgcaacctggaaaaacttgcggtaaaattaaaatttttcatttcaaaacaacagtgctcttagcttaatcctctacaatattgtattcaaaaatagtttttctgtgtgattaacagtaatattacctgggctatttttaaaatctggaattagaattcaattttaaaaactgcactcaaaaaacatcctggattcagatatgaatggacctgggaagtttcttaaaagaaatacattttatcctagatcgatagtaagaaacagcaaggaaatgcacagaaacaggatatagggaatacataaattgggtctacactggttaagaaacaaagttaaaaaaataattctactcactttaaaatgacactgtgctgaaaaataatgagaatagataaaagctttgaccactcccattgtctaccttaaaaaaatactagtatagttactcaaggcacggaactggacaaactgcaatttgaatccagaagacagaatccagagccagggacaaaacaagtcaaaggagttggtgaccagggcaatggccagaagtttacccgtttatatcagattctgtgccatccaccctgcggggccgtctgagctgtgcttccccagctggtgggcccctccacgtcagccctctcgtagactccaaaaggaaatcagagttgaacagtatagcatattgttattaaaagtgatttgagttgtgacatgaatattgtactttcaataaaggaggtatacactttagaaagctcttcagcctctagaaagaatagacatttaaaagattaaagcgtttaaagaatgatctctccactgaccagaatacccacatcaaaataatgtaccactgggttttattggtagctgcaatttagcccatatgaaatggaatatggccttagtgttaatgcaaatacgttgccatttatcataaaataagtgtcatctctaaaggtaactggactttccttaaaaatgaaccattctaacatgaaagaggcataaattaataaatccctgagaaagcctagcctacggctgtaaggaacatctaactgcttaactgggcaaccaaaagactcatacaaataattagaatacttatttccaattgatgaaagcaaaactactccaattcacattaaggttgatgagtcacataaaccactcactgacttaattttacttagaaattgctcatgcacttttgttgctttcctggaaggttatacaaatgattatatactcatttaattattaaactgaatgatctccttaagggcaacattaaacatactaaagtacagtacaccatgtcacaatgtgcttaagtatccctactaaaaataaaaattaaaacaaggttagaaaacaactaacaactaggttaaattcaatccaaaatatagatttgggaatttctaataaaattgtccatattgtttgaatgggttcaccactgagtaatagtgtgaataatttaggtaatcatctcaaaaggttataattcctctgggaaaaaaaaaaaacatgtttaaaactctacacttacaatatttcacataatataattaataaatgtttgctagatgattggatttaagttatatgataaaaaaatactgctcacacttataatgctttaaatgctttacaacttacaaaacactttcacataagccaccttacgctaacaactgtgttaggtagatattactatccccatttcatagataaggaaattgaggctcacagagattaaatgttttacccaaggtcatagccctagtaaattcactgcttagagaataattagcttaagttaagataacagctacttcctgcttccccattccagtctcagagacacacaaacacaatatgcatcacatataaaatgtgataaaatcaaaaattatacatcaatcatgtttatgcactacattatttgcctatttccattcgtatttttgtaagcgctgtttctgaaaggtaatatagcatataattacacctttctttttaaaatgctatgataatcttctcactgcctgggaagtttccatggcagaaagactgggcacagtcaggtaactggtatttcttgattaccatccaccagtaggttgatctttggaaagttacttatctttggaaagttacctatccaccagcaggttgatctttggaaagttaacgcgggcccccaggttccttgttagtcacataagggatctgtaataaacacttcctaagtcaggtccaccatccattctccacagcagtggttcttaagctttaacatgcacaagaatcacccagagagcttgtcctaacagagtttctggcccatcctcagagatctgatttaataggtccagatagggcccatgaatctgcatttcccagaagctcacaggtcagaccagtgctgctggtcgtgggaccaaactttgggaaccactgctacacagtaacatgggaaaccgaaatacttcagaaaatgaaagtctgatgtagcttctctccagaagccttcagtggtttccccatagcccttagcataaagtccaaagtgctaaatgaataacagtatgtggacacccaggtctccacccagatgcattgctcaggatctctttctgggcctttcctgataccccaagctgctgggctgagttttatgtccctcatctgtgctcttaggaaaatgtgttccctgtgtcctaaaactgtaaggaactgttatcacatgcttccttgcctctgttctcaacattccagaagtggtttgtaaacatacccccaactcccactgctccaaatttaaggggggaagagtcccctcatttcacctcacatcattttacttaagaatcgatgccaccttcgggctatgcatcaggtctcgtttccaatatttctagcagagccctcctcaacccttctttattactccccactctgctccccaaataggccacatcctagccccccattaattccccttcctgaagaagcgacagagataaggaaagcccaaagagagaacctgcacttctctgagcacatccctgaatgaggcaccaacttccccttccccaccagcctgctcttctcctcacaggtcctgagcatgctcaaggatctcaaagcacacagggccagtgtcaggagcatggacccatgcagtcacatagagccccacttacgtggtccccatgcttggcttcatgctcttctgtcaccatcttgaaactcttaatttttgaacaagaggcccacacattagggagctggtcctgaaggcaaattatggaactggatacatctcagctcctcagcaagcacacattaccacatcccattttcacccacactatctcagcagcacagctcccagcagcctaacagaaaagtcacgctttcctctaagaaactgccatacttccttccttcagagtaaaacaaaatcatattatggattgtatcatgctttttacataactaccaggaaactttttaaacacatgatgctaatttagcagccaacatttttgaacttcatggtctataaatttgtactgtttcccatattttcagtctctgtttctattttcttggtcctgactctcttttccattggaaattcatcatttattttactgaatatgaatatcctgctgagagctgtttatcccacagtccagtacacacaggaaggaggcacacacagtgcagagagccatcctatacaattggaatttaaagagatctgacttcataaagtacgtgtatacacatgcatacctatgcttccatgcccattaagaaaatgtggaaacaagaaatttaggcttgggagcaacggccaaaggagaaacaaggagaaggaagagatttacttttcacttttacctgtatatagtatttaattattttctgtaagtatattacttataatttttcaaagtaaatagctcagtaaaatgatcttctgtcaagctcaacaattgggtgcttagcagagcaagaaatggaaaaataatggctaaagcagcttttacgtaatctccaaagacatcaactttcacatcagtttctcatagactgtccagcatattggaaccgaagaaaaagagcaggcataaatactcagaacaataaacttgaaaaatgtaacctctggtatacatttaatggtattaaatgaaaagcagtgaaaatgaaaaccttaaacatctgcatatactaagactatgttaagaagaaacgattattaaaagttaactaataaataagtaaaagtttgagtatttgggggtgaaaaattgtcagaaagcaaatgtgtaaaaagatatatggtcctgaaaatcctcgcttattctaaatttaaaatgcaccttgattctattgcaaagaaagttgaaagtatgtcatcaaaaagtcatttaaaaaaactactacttaaaaagtgatcagataatttacaaagattattctcaagaagtcagataaagataaagatgccccatttgttaacagtactttttgttcttctggataatgtactgaaaaccagtctagcttcctatggtatgcataacttcctctgtaatactccaattgtattaccaaaagcaaacattacttttgttatcaaagcaaatttaataaagaattttcaactatcttgcccactcacttgctttgtaattcagataaatgactcaacatctccaagcttctttcatcatcttgtaaaaggcaaatagcaatctctcccaagcagcactgtactgagaattaactgaattgctttatgtaaattctcagcacgataccttgttcatggggggtgggcaataaataggaggtatcatcatcatcactcttggtaatgacgataaagctggtatattttcaattctattgcatacagtagaatttaaatttagtcaaaaataatgttcaatattaagaaataacagacttcatcttcataacaaaagataggttggcaatggctaccttagaagctacctaattgcctggtcacaattttttctttgtgtactttcctaaaataaatttaatgaataacaaactatataaataattttaactgataatcatgtgcaaagaaatacaatttggcactcaggctgagcttatcccactggaaaggtgtgcattaacatggtggcatgtattcgtttttcaagtcactttactggccactattaagtctctgtgtggatgaagtagaaactaaaaaaggtctggtttgagaaaggccggaagcaggaggcaagtgggctctgccaaggtgcatctgtatccacaggtaagaaggaaggttctccattctttctctctctctctctctctctctctctctctctctctctctctctctctccctctgtgtgtgtgtgtgtgtgtgtgtgtgtgtgtgtgtgtgtgtgtgtagcattgacaagggggtaagcccctacaaaagagagtgaacctcagaagagagatgctggagagacgctgtgtcctccaaaggactcatgtcaccacagtcaccatacccaggtcaggtctacctaacagccacttcaattccatctttctcatgtgacacttaaggctatgctgactttgccaaaattgctttcagccaaattttctaaaagaaaggaaaataagcatacttttctgatgaaaactgttgtcagacaggcctgtaactaaagccatttcatacagaatatcctggccaatgtttagcacatggtgctttacactgaaaactttaaaagctagaacagctatccatatccatcttctaaaataatgttgtaacagcattagtaaatggtgaataatgtttgaacagtgtctactaggaaggacttaatgaaataaagtggaagatatgtgaaatgactaacatttgaattcataaggatgttatgccccaaaaccttatttttggtatcaaggtggccattttgattaatttcctgatgatacttaagaaagaataacattaatttctaaagcttccagataataactttttcccaggttacagcttttatatatgttatatgcaactcacactaattcacacttaacagcagatagaatctaaattagatcttcttataaattatttccagaatgggcaagagcaaccaaaagataagatatacattatctaattattcaataatgctaggaaattcttttaaaatatacaaactaggctgggcgcggtggctcacgtctgtaatcccagcattttgggaggccaaggtgggtggatcacctgaggtcaagagttcaagaccagcctgaccaacatggagaaaccttgtgtctactaaaaatacaaaattggctgggcgtggtggcgcatgcctgtaatcccagctacttgggaggctgaggcaggagaatcacttgaacccaggaagtggaggttgcggtgagccgagattgcaacattgcatgccagcctgggcaacaagagtgaaactccatctcaaaaaaaaaaaaaaaaaaaaagacacaaactaagcaaactctaaatttatattattttggaagactcatcaaaaatcctgctccaaacactcatattgctaattatctcattcaagatattacttcaccatgtcaatattgatttattattttatactttgtttctttcccccaaaagacatgagaacacttacaaaaaatactcctgccactgagataaaatagataggtaagtaaatctgggttaagtcagaatgaaggtaagaaagtaaatatatatgggcagtggtagagcacaaaaatgtaagcttttaggtccctgatcctttgccagtaaagctgtactttccatcccaggctcagtttcttccgtgtttgctgggagttcctgtattactctgtagatttcatcgaacttttaagaaggcagtggttgctttgcctagcaagggaataagaataatgagctgagagctccaaggtggtatttggaaggcatactttttcccagaggaaaaatactgaagaaaaaggccagttgtacaggaaatagggacagacattatcaccatattgaagccaaatagaaaataaaatgattttttttaagtttaaaattcttttgtttccatgatatactcaagagtctgactccaaataacaacctcaaaaccttgtttctgttttcagtgccttcctgaactaagtgttttccctcaagtagcaccaataaaacccagattccacccactggcattctgtctaagccaacacagcttttatcaggtgcttgaaaaagactttgcatacagtaatgtgagacgctgaaggtgcatggcaaacagcaatgcactgctgtagaactccaagttgggcttctaacctcctgagagactgatgactatagatgtcacccaatcaatgaacaaatgaattttcttcagtatttaatagtgtattttggtatctggattactgggaattttaccaagggccaaaagagcctattgctaccaaccagatttggttgggggtttggcatctgaaatgtactcttttccccaggagctgaaattggaagtggacttatttaaatgcattggccttgatcacagtggatgcctagatttctattaacttttagccttgttaagtccaggtaatttcagttattgatgtaccctccttttaacttctccatcatcaaaagacatttattaagtacctatttgtttaccttactcttcgaagtaccacatggagaaacacttcttgccctctagggaacttaaaatcattcctctcatggtctccttctggctttaactagataccattaaatagttgcctcattctcctgctgcaaaaacatttcttcagtgctggctcttcattaaggggtggctaatgaagctcatgtagatcacccaatttggtagaaactctgatggctttagcccttcatctctcctaaatgctgcaccttatgaagtttggcacagcctctcacaactccctatctgccatgtttaaaggagttttgcatttgtttgtttttgattctacgtatttaaaactaccagtattttcaacaagaagagcaaatctaagatgcagataaattacgttactttgaatattaactattatatagattgacaaatattgctattttatctccagagaaactttaatatagagtcatcttgtagcactagggtaaaaaaaaaaaaaaaaaaaaaaagtctaagttgaagagatttttccaaatacgatgtaatttagggttacaatgtcaaaactgtaaacctaaaattaaactactaactatttttgtttgcaggcttcttttctcaaaattacaaccgcattacatttgttgcaaaagaacagattcaagccaggattttgttcattcacatgttattcctgctttacacgtattttatggaggagttacttttgctggcattttgttttgttttgtttcttttactaaatggtgagcaatgttagagataaatgtaactgtctacaaacactccagagcaaaatttggaaagaaagcttgagcaaataatactacatttgatgggatataagaaattaagagttcttcagatgacaagaaagtggcatattctttttaacacaatggaattaaagctatggtgaataaagcaatatattaagaatcctctggaaagccaatatcttgaatcattacatcagaatctacactgggactcttataacaaagcttccatccctgggaaaatgaagaacttcactatgagaggatggaactacaccaaaaaaacttttccaactccagtcttgggagcgcatcaaagcaacaggccctcgtccctggtaaactgtaatctaggcgtactacactttctgcatgttgagccaaggaatttcctcctagcaacaggctgtggtctgatgggctcgtccacctcctttccaagtggagagaaagcaaaatcaggaacaatatcccctgaattctcttcatcaaggattatcagacacctgttttaaattttaatctcattagttattattgataacaaggacaatgtagatccattgcaaaggcttataccacaaagaaaacacaactctaattagtacacgcttcataaacaaggcaaaggtgcctatctgaagctattttaaagcccttgttgtggttcataggcttagagagagatgctttgaattctgcttccatgtattgtactaggggaaagacatggcattctccaaatattattgagaggcatctttaccacaaggcaggatagttctgggcatggggctccctttcgaccatacctagagcaccaagaaaccaggagccccgcctgggagccccagtttcttctctgctatctctctggatgctggacttgcagtctcctcaacagtggatcacagcccatagctctcacatctttttatacccaccaatcccacactctcaacctcgtaaacttcacctccccttcactttctcctcttcctcctgccctctcccttatttcccattcagaaaacccccttcatcaaggtgtaacttcctcaggaagaactgcaaagaatcagcccagtgcagatgaggttccaccacccgaagtttctgctctatatccagtgaaatcaatctccctacacacacacacacacacacacacacacacacacacacacacaccacatcccatcttcttcctattcctctcaccccctcccaaggagagttttctgctctgaactacgttatatcctacctactagcccatctactccctcacccgaaaagtctgaactcctctaaggcctccatcagcagcaagatactaaactctgcatcctgaggtcaagccaagccaaatgttgacataccaggagtctctgcccctccgaccccagcttctagttgatattcccacatttcacttgaaattcaacatcctctcccttacaacctggctacttccccatatcgcaaagtaaaagccttctccagctttaaaagttaaccgctctacctaaattccagattccaaagtttcctattccttgaataatattgcaaatagttactaagatgccatactgattaagtggcaggaactatgctagacatgcattatctgacacagaaatcataagaactctataaggtataaatagatttggttgaatcacacaatatttgtaatacgcagctagatttaagccatgaaataattattttgtatttatatgtgcattattattagctccattttacagttagaaaaactgaggctcatgagacaaagtatgtttcccgaagtcacacagctcaagtatataagaccccaaggctcacagccacataccacactgcccctcaagcttatctgactccccaattttgcacagagctggtcctgtcttctgacctttacttaagtaatgctcatgtcctctccataacttattttaacagccagggtaagacccacattctcccatgaagctgtcctgacaaattccaagccaagctggccccagcctcccttggaatccatagtataattgagcaagctgcccttcttatgccctgtatgccagctaatcattctttaccagtgagtcatctcttctcaaactaaactgcatagttggcaaagcttagaaactctggtaactatgtcattttccctttctgaaccaccatatctcaattattaaatgagggtgttagaaaaaggctgccctgtttaagagaaagcatgaagagcctgtctgcttagcactacccttcattacctttccctccgcaaagcacaaaggaagcaaatcttggcttaaattagaaggtagcaagttgtcctctttttgatccttggatccccatttccaatgcactggtgctctcagatcttttgatattgcaaagacttcctcccttgtcaactgtttccagttcatctttccaaaacactttctacatcccactaatactaactttcaagaacacagcttggaacatgtaacttcctttttcaaacactggcagaaactccccattatctaccatggaaggcagaattctaagatggcccctaagacttcctgcaccctcatctacaagccctgcacctactgaggaaatccattgcatcagatggcattcagggtccttaagggtcatttcctggattccaggctcaggttacctgacactaattcatgcacctcaagctccaggtaaactggtaatctgagcctttgcccaagctaatttccaggtaaatctgtccctttattcattaagtttagaaatctgcattccaggaccaggcacagtggttcacacctataatcccagcactttgggaggccaaaatgggaggctcagttgagcctaggagttcgagaccagcctgggcaacaaagtgagaccccattgctacaaaaaattagccaggcatggtggcacacacctatggtcccagccacttgggaggctgagctgggaggatggcttaagccctgggaactcaaggctacagtgagccatgatcacaccactgcactccagcctgggcaacagagtaagatcctgtctcaaaaaaaaaaaaaagaaagaaagaaaagaaaaagaaatccgtattccttgcagaccagctcaaacaccccttctttcctactctttggactcaacattaatccatttcttctttccactgctccctcaagacattacctggaattctatctagtggcttatgcagctaaatcaggggtgtccaatcttttggcttccctgggccacactagaagaagaattgtcttgagccacacatacactaacactaacaatagctgatgaacttaaagaaaagcagaaagaaaaatctcataacgttttaagagagtttatgaatttctgttgagctgcattcaaagcgatcctgggtcacatgcagcctgcaggccatgggttgaacaagcttgagctaaataaaagctcagggagggtagttgctatgcttagatgatagagcagggacttcctgacagaaatctatagcaggggcacacttatgattcccgcaggtcactgagctgatctactctgaccttgtcctcgccttactgataagtgactactacgtaatactccagttcagactcatgatactaataacttctccactgcattgcttttctgaattgcaatctatttgtaataattttagcaagtccaattctcacccattagaaacaaatttaaatagaacaaagcttaaaaattagcattccaattttttttagggcatttgtctataaaaatgtagaaaccactaattatttaataattacactgactctttttatacctcaagttctcctcttgtgcaattcaataggagatcaatcaaaagttaaattttttgagaaatcatgttttccctcaatgtgtaaaagaggaagaagaagaggggaagatgtgttacatgactggttagaggccaatctaatttcaaggaaatgcaaacgcagaaaaatcttatcagctctagctcaattcctctaaatatactaaatcaaaatctaagaaggaaatggaaatacctgtgattgatagagaagtacaatactaggaatccacctggtctcctcaagggcaacggtttgtttccttctcagccacactatatcctatcagccaccctaaccgcccactacactctagttggccaagaagtcactgagggctgtcctgtgtatcttctcaaattttgtcccttgagcaaacaggattccccctgccttccaaaataatctaaaacaatattaaaagaaataaggtcacatcaaaataaaacaaacagtaaaatgtccctcgtccaattacgccttccagtccccacacttattatgtttgcctgaacaattaacagcttttaagatatttctggctgacccagaaggccatattcaatacacaaaaaggtggaaaacaagtgataggctacacagaaaattgtgccatcatttgctgaggcttctgttcactaagatcacagctatttttcagtttccacatgatgttctgtgtagaaaccatatatccctaatattggaagaccatgatgatcttatcactaaaacataacagctaagaactaaagagaatatttagattgaaagtgtcctgagaaaaatcaaggtgtagaggatcacagttggatgttctgccctatcttagtctcttccagaatgatgtacatacacatgggctccgcatacatgaattcaaccaaccatggaacaaaaatattcagaaaacaaaaattccacaaacttacaaaaagtaaaactccaatttgctgcacactgagtactatgctgaatccactcaaatgaagtgatatgtaggcactgtattaggtattgtaagtagagatgaattaaagtatatgggaggatgtgcacaggttacatacaaatactatgccattttatacaaggaacttgagcattatggtgtttggtatccccagtggggcctggggttggggcggtcctagaaccaattcccccaaaataccatggaacgactgtattttccattgtcgtattttctttacctttaaaataggaatacagtatcttccctgagaggataagtggtttctcaattttataaatttttctttgaaagaacctgttggcttttttaccttttcttataggagagcacatgacatttactttcttagcgaatttccagtatacattacaatattgttaactatagtcctcaacttttgcattaaatctcaaggcttattcatcctacaaaactgcaactctgtaccctctgaccaagatctctgcatttccccacctccccacctcagcaccattctactctgcttctaagtatccaacattttaaaattccagatataagtgagaacagaaggtattatttagaacaaaaactgtaacctcgttttttaaatacatttgctttggatatccaagaatcttcttatctcaagaatgctataaaaaaatatataaatcccattcttaagaagccagttattgtttggtactaggttcatccttacactacattcctcctcaagaagaaaataggtgctacttgggaggctgaggcaggagaatggcgtgaacccgggaggcggagcttgcagtgagccgagatcccgccactgcactccagcctgggcgacagagcgagactccgtctcaaaaaaaaaaaaaaaaaaaaaaaagaagaagaagaaaataggtaatatgatagatttgaaagcaatgattgagcttgtgctgaaatgaagtgatggattgtgcctggaattttttggtttaatgactttagatttaggataaaatttcattttatagaaacaacatgaaaaaatcatcattgcttataatattaaagtctgatatagaaagtaatagtaagttttccagcataggcatggggcttaaagggagatttgactctatcagagtatcaggattcactctcaactttactgtaattctccagaagagccaaaagaaaaaaaatccagaaatacagaacaaaatatttaaagatccaagccaaatgttttttaatgatttttttcttttatgctgactgtatatataacattttgtcattctgatgaaatacatgttatttccttttgaaatctgaatgaatcacatttcagaaaaattcattgaaatatgatttagaacagtgatcaggtaaaatttttaacactaattcagatttaattattatagtctttaattccctgtcattgttaaatacagcactaacagaataattaattgggaaggtatgtactatacattttaaagagcatttttttttttctaaaatctaaatgatgacaatttggctttgtaacacaggctgaaaatatttattcattgagatacggatcatctcccttttaacaagctaataaacaatatttggataacttttttttggctaaagtctattaggtaaaacgaccatcaacaaaaacaatgaggctaggcacagtggctgacccctataatctcagcactttgggaggctgaagcaggagtatcacttgagtccaggactttgagaccagcctggaaaacatagtgagatccccatctctacaaaaactaaaaaattggccgggcagggtggcatgcacctgtagtcccagttactcaggaggctcagatgacaggatctcttgaacgcatgcggtggtgcctgcagtgtgccatgatcatgccactgtactccaacctgggcaacagagcaagaccctatctcagaaaaaaaaaaaaaaagcaatgaatatataagcatattagtcttaaaaaatacttcttatgagctttattaatataagcatatatttaaaaattagtccagataattgctaatcacattttaaaaataaatattagactaatacagccaaagaaaccttagaaataaagaactgtagttattctggtaattctgtcttttcgatggactaataattaaaatcaccttttttgtttggattccaaatggtttcccaatttatcataaactcacatgggtggggaagttgtggaagagagtaagaaatcttggccaggcacggtggtgcacacctgtaatcccggcactttgggacaccaaggtgggtggatcacctgaggtcaggagttcgtgaccagcctgactaagatggtgaaactccgtctctaataaatacaaaaaaaattagccggccgtggtggtgcatgtctgtaatccgagctacttggtaggctgaaacaggagaattgcttgtacccaggaggcaaagtttgcagtgagccgagatcacgccattgcactccagcctgggcaacgagagcaaaactccgtgtcaaaaaaaaaaaaaaaaagaaagaaaagtaaagtaaaagaaaagaaatatattctaaacatgtgcagaaaactactaccaattttaaaagctaatttatcagttgaaagatttctgccacctatcattgtctaaatggattcccagtttgctggtgagatcttatttttagactgtgatatccttgaggatagagcctgtgcttttcatttctaggtcagtatagggcatgaaatattaggaagtactcaaaactatctgttgaataaacaaagcatggatgaattttttaaaaaccaatgaattggaaaacattgttcttgaatatctctccatagacttgaaatatatcatactatggagaaaggcacacctactttggattttcatgaattagttattttccctgaacctaagtaatatgaatactggcatgaaaatttacaacggtactgtaatcatggtttttttaaaaaaaatttattttctccaatgttgttgatgataataaccaccccttacatatgtcaattgtaagcaagctttttgtaacaagattcacaatgtttcactctaattctcaatacaaatcatcaaggtggatactatcatcaactccatcttacaaatgaagaaagggaggcctcaatgggtttaataacgtgcccaagttaatattgctgtttagctgcagagaggaaccttctgaacctctggagtctaagctccagccactcaacctctcagtattttgaagtaattcatgtcttattatggtgttaatttaaatcaattttacataatttatttttatatacttcaacatcattttcaagtatccaagtttttatttttaactcattaataattcatttactcttcctttaatcagatgactcatacaactttgcattttctatcttttgaagacatatagtaaccagtagaaggaatctaaagctattgtgttaaactactgactttaaaaataattatataggaacagaatcatatgcatcaaagatattagattattgaaataataaactttatgattctttttttttttttttttgagacagggtctcactgtcatccaggcaggagtgcagtggcgcaatctcggctcactgcagcctccgcctcccaggtttaagcaattttcccacctcagcctctcgagtagctgggattacaggagcacaccaccacgcctggctaattttttgcatgtttagtagagataaggtttcaccacgttggccaggctggtctcgaactcctgacctcaggtcatctacccgcctcagcctcccaaagcctcccagaaccgcatccggccacgattcttaatagtaattcccacatctaaactatacaatgttccactcgaacccatttacaaaagccacactccattttagtggtcaaaacagtaaacatttaattgttcatttaatttatttgggctatattaattccacataaattcaaattgcttgcaaattgaggtatgcttgattttgaaaatattctaatgaaaaagcttcctttctagccaggctttaccactacgtaagaaaggatctgactgtttggctttttcagtccatctgagatgtctctttgtaactgtattttaattttattagagtgtgttactcatgtggtttctctttcacatgaacccaaaccaaaactaatttaatgccatgttccaggtgactcaatatgaaatggggacacataaaaagatcttatctttttggaatcttagaaattcctttatctcttttacttctttttaaattttcaggtagttgtttttattataatcattattatatgtaccacctacttgtaaaaacgctttgggcaggtttacagggaaaaaaaaaaaaacagtagtagagaaattcacttaaactaagtatgagaaaagaagtgccctaaatatcacaggaaaatcaactacatacgatttcattttataatatttctacattcacgtacaggtaatctccaacttactattgattcgtgctctaaaagctcatcggtaagttaatggtcggaactcaatgaattctattgaaccaataacatattaggtgatcaggttgttacaccagcacgcaaagcccaattcaatcctgaatgcaactcaaccatcataccaatagtaccaacaggaattctgagtctaaagacgatggccttatgaagaattatgccaaatgggagatcaagtacttctacaataaattcattcattcagtagacattaattgagcaccaaaaggctgcagagtgtcagctttacatgtactaattctggaattaaaaaggcctggctcctaaatataaactggagataaaataatgccttaaataaaataatgtatgtaaagtttgtggcacataaaaaaatctttactaattttaactctcttcctttctgctgaggaagaagaagaaagaaacagagttctcagctttacataaattcttgaaggaagccaggcttaatttcctcatcatttgcactcctctccaccttcccttccgggcttcagggcccagtgcaagaccctcactgagccaaccatcttagacctctctctgttccaggctctaaaaatatcccctcccaacctgacttttattcccatcctgcagccactaacatctgctaggtgataaagaaaagcagatgcaatggcgcgatctcggctcaccacaacctccgcctcccgggttcaagcgcttctcctgcctcagcctcccgagtagtggaattacaggcatatgccaccatgtccggctaattattttgtatttttagtagagacagggtttctccaatgtcgttcatggctggttttgaactcccgacctcaggtgatcagcccgccttagcctcccaatgtgctgagattacaggcgtgagccactgtgcctggcctgacctgatgaatttctaattagtggtatttttaagacagtataaaagaatggtataaaataattcaggcagagtacaattataatatttggggacagggagaaagccattcatttattaattcattcaggttctatgaattgccttctatcttcctggatagacatatgtcagagatcatgtcctcatagagctttgagttcatcagggaaggcagaacttgtccaagctatatgactatttccaatgggtattaacaaatatttgtttaacagagtgaataaaatgctatgaagaaacttagagagcaacagaaatgcaaaataaagggcgctaacagaatggaatgtcaaggaagacttctttgttgaaggcttctcctagaatgtaagtcccatgagagcagagatatagtctatatccaaatgaaccctgaatttcaagaacccagaataatttcaggcacatagtacgcacttaactaaaaatacatgaaagagaaaaggaagattagcttaagcttagacttaaagggtgaataaaaattagctggaggaaatgggattaatagaagtgaaggcatttaggtagaaaaaagtagcactttttgacaaatttaaagaggaagcaggttgtacagacgatgaggcagaagttccagagagaaaagtgagaaacaagtttggaaaggtgggtaaaatccagatcaaactgggcctttcacaatgtgcaaagaattggagacatttttcctgagactgactagcctactgccctggaaagcccagcttggattgaactttccacaatcatccctcagaacagttctgaggcagtggcatgtggattctggtggcgaaaggcaaagggggagcggagaaatggagttcgcaagatgagtaactgaggatcccaagctgtagtggcagagctgccactctgtcactagaacaaaccactaagaaataaatacaacagggatatctgagtccttggcctacagtttttccatggggaaaaaaaaaaaaaaaatatatatatatatatatatatatatatatattcgttgagacatttgtttgtaagttcagattgctatctaagcatgctgggagaattcactgggagaaagccctgaaaagaaaaactatttgctcctgaatttatctgtatgagcaagtatgtgtgagagagacagagagagggagagagacaaggaaaggcagagagagggagagagaggcagtcctgtcagagggctgactgtaaaagaatggaggattacacacttcactgttcaagggtgacagagggaaaacgaggctggcaccaagcaggaagcccaatcctgcctgaataaaacactgcacatttatgcaatcccgggtaccagatcttttatcacaaactattttgattgcatagaaagaaaagtgctaagtaaaaattatttactccaggtctattatgaaaagaacagattaactccctaacagttcgttctttttgaaggtatattttctaccttgctggtatgatttatattaatgagaggtttaaaacaggttttaacttaagaatgattgctgatggtgaagtgcagtaattatacaccttatgacaggacacgtgaatggctcctacaagagaactgcataacatgtcaagctaatcctccttgcataaaaagagagaatactttgcaagctggccgattttaagctccagttaacaaaaaccctttttgttggagtctaaaacaagaatgggttaacaaaagcaaggaggaaaaaaatctcatttttccccttcttcacaaaatatactattacaggacttaaaggttttgaaaggccacagtgtggctgaaagacttgggaaagaaacaaggtcttcgccaacaacaccacactcaaaagatcctaaggtaaatcgcagtctcttatcagtatggaacagtatgattttactctagttttttgttgttgttctgtttttgatttttaatgagttaaaggtgtagcgagggaaggagcgacaccatggctaggtaagaatgaaatgggttcatggatgttaggaagaaaaaaacgtatgccatggtgggcaagtcaatagtgtttgtgccttttctgcatggctgctttttctcatacaagagccacttctggacaataatgagaccccgtaaagcatctgcttagggattacgaccccgtcacactgggaatgttcagttaacacagagcagccatgggcttaactccgtgtgtgcctgtcttcctgctgcaaaacgcaccaaatgcacagtggtcctggattcttctaaatcatttgccaccaggaaagaagatactcagctactgacacaccacctacctgctcaaggaaagcaaaaattaaataaacaaaagccatcagatttacttcacatcatggaacttgttaagacaagggagacaggaagactaaaggttgccaggtgtgagaaacgaagtctggaagtccattttaaagtattagagggctaaggatcagcgtcagtgttaaattcttttctaagaattcttttcaccttggaaactttcaaatgagaaatttaaggagcagaatccttatatttttctatgactcttaagtgatttacagaatcctaaagtgtagcaagttcttataatgagttgaactatttaacttattttatttaaatgtttatttcaattgttttgcctatgtactatagtctgtaactatcctagtctataatcaaagaaatcaggagtgcccaccacctatttgcagaggtctctaaagcagagtccacagtggccagggcccatctagcaaactggcatgctcagtgggacaggtcaagagggcgggtctgcctctggcttcctccttcttctaacacatgctgcacttgctcttgataggatagagcaaaaagtcaccactttttaagaaaaccaaggcaaagaacagaaagtttaactcgtggtacctcctaaacaattgatgtcattactgctcttcaaaagatctcttacagacatgtagtttagccataaagatagtacgttgtgttgaaaatgcaaaatcacacaaatattgccttaaatattttatttccaaatgtaagtaatagttaaactatttatatcccttcatgagaaactggaagctgaaattttcagatgtgaaggaatttctcagaaagtgatcctaaaaattttcaggaaaaacatctaacaatttaaccataaagagctttggtgaagtctgacacccagtatttagctcttttgctattattcttttttttttttttttttttttttaagatggagtctcactctgtcgcccaggctggagtatagtggtgcgatctcggctcactgcaacctccacctcccaggttcaagcaaattctcttgcctcagcctctcaagtagctgggattacaggcccaggccaccacgcccagctaatttttgtattttgtagtagagaccgggttttgccatgttggccaggctggtctcaaactcctgacctcaggtgatccactcgcctcagcctcccaaagtgctgggattacaggcgtgaaccactgggcccagacttgttttgctattattctttaataactgtttgcaaactacaaatattgaaaggtgagcatatgtacaaagacaaaattaactagtagtctgagctgaaatattgtagcttaattctagtctatcaattttgatctgaaataataactctgagggcagttttgtcaccatcagcactcattccaatattcaaaaggaaaatttttgtttaatttatataacatcttacttatagatgctttacttatagaaagcacctatcaattataattagcaaaacaggagtcaagggcattgttttattgtgttacatgtcaaggaaaggagacttagagctaacttctgtgactcttggaaaatccaggattgaagcctgcagtcctgtgacttattgaacagtcaaacctaggagaaattatcctaaggtaaaatgtcagaggattactctctagattggatggcagagagagattagcattctcagcatcaaaaaccagatcacaaacccatctgcaacagaagtacatgcaataaaagtactagaacaaaaatcaccacatttaagagagaagctacctcatggtgtagtaggataagaaggaatgagattgataagaggaggcatgtaggtatattatcattactctttttttttttttcttaatggagtcttgctctgttgcccaggcttgagtgcagtggcgggatctcggctcactgcaacctccaccttccgcgttcaagcaactctccttccttagcctcctgagtagctgggattacaggcacgcaccaccacgcccagctaatttttgtatttttagtagagacagggtttcaccatattgaccaggctggtctcaaactcttgacctctgcccacctcggcctcccaaagtgctgtgattacaggtgtgagccactgcacttggtctactcttttttttaacattttgttagttatgctttgtaaaactagcatatttttaatttaatttacatcaatttaactaaaattttattaaacattcttaaacttggtggtgctggcatttgttcgttgaaattttttttttggttttttttttgggtatgttttaactatttcaacatacgtttttaaaaaccagatccaagaggatcagaataacaatagtgaggtgaaatcactggatcaaccaggggacaaaaaaaaatagcttcacatatgctcatttggtctttttgaacaaatgttgaataaccaaatcttttagacttttaaatcattcattattcttgcagttcaaatgtggcaatcttaactatttagggtttcacaactggtaggtacttaataagtatatgcctatagaggataatgataactttactcaaatgggacattacagaaaatgttatacgattgaaaacaaaataaagaataaacaccaagctcagaaaaaaagacttcacactaattcactccatctcattcctttaaaattcaggcttaaaaattttttgataaaggcgatctgatgttcaaaggacatcatttaaaacttgggaggcaaactgatagaggagaatgccttttgtgtttaggaactcccagtattgccagccccgaccttgttcctcaccagctgtaaaagcctgtgtgagaccttagtgctgaaggcctcagcttccttatctgtaaatgattagaatagataataaaggcaacaaccaagtttatacagtttgcctgacaactttgacatatactatctcaccctaaaagatccctttgggttttcatgggctatcatcttggttttatacacaactcttatttggttatatgtcacttacctaagtccaagaattacgaagcacagttgttcagttaatttatttcttatttttaaaaaaagcactgttgtactgctgtagatagaacaactctaatcttcacgtactgctgaattacaattaggtgctaaatcaccttcaaagaatgaacaaccttttgttttgaggctcgtccagaagcatcactaggacctgatatgtacaagaaagaaaaaaatagtaacctgggcagtaagagttttgtcagaaggaatgcttgtccttatcagaaacaccacttatccccaaggcttgaactttaactatgaaactttacccactgggtttttaacacaattactactgcaagctcaccattatgtatttaaactcacaataaagaatcaatgcctgatattgcattatttcctaaaagcagattttgatggaagacaagaggctgggctccagtatcaagagtgtacaggatattttttaaagacatatttaaataatagcattgatcataacacaataatcactataccctcatcttccattcctacaacaaagccccttaacaaagacatgtgtacgcattatagctaccagttttatatggaactgcccactaatagctaaattggcatctttatgaatttaaggttctctataatgttgattatggctactgcttttgactgtatttttcaaaactgaccacaaaatagaagcttctaacttctctctgcccttgtgtttgcaatctccagagaaagcactccttaatttcatcatagtggtcagtaatctttagtgattgagacagaaattaaaattgattatttgaattctgacaagctgcttatgtttgtaattaccataaaactctaccacaaatgccctagagtccacgggtgtgagtgaggggttgataggaaatgatccattttcatgtatctagatttaggacgatgcatgtggaattgtagagccacttaagatcacactcatccgtgctggactaactgaagagggaagtcactatcctctcttaatagaccagacagtcctcacgtcattgctacaattaaattccagagaattttttggattctatttaatgaataaggatatatttttcatgtggtgtcattgtttcactacttcccatgtttatttggacagattcatagcactgggtaggaaatgtattggttggcaacttcagttttggaagagaaagtaaacacatgctgattagcaaacagtaaactctactgtgtttaattttggcttctctttaaaaaaaaaaaaataaaaacacaaaaaagccactatttggtgttgtgttccaagtaggagcatttgtccctaagttctttcctaaccccttactggagggcttccagaattgctctcatttttttttcttcttcccctaacaccagtggcaaacgccaacattatttaagaaaatacttgtgcatatggtatcctcctagcacagatttgccatccagttgaacagtagggccactaacccacacaaactaaactgcaaaattatgaactgcataaacataaacaattgaatttagccctaataaattcaaggtaaaatcacacttctgaaattcctaaaaggctacgtcactgaaaactatcaggtctgagaactgaaggtggtaaatatgacaatctaaaacttccaatgctctctttagagccaatttctttcatctatctcatcctattgatttactgtgactccccaaattattctccaagctttagccattcttagccctcttctcatccatcttcagaagatcatcaaaatccctaacacccaaaaagtgccgaaggccagcacacacagggaaaagcttggccacctaagatataccattgcccactgagcacaaaagctcttcattatgtctatgtaccttctcattaaacagagctggtgtctgatcttttcactgctcatgattactactcattattaatcagacttcccaacatgcttccaaggtatgcaaaatctcgtccccacataccagatgggaaagctgaggcatccaaaagttaaataactcccaaatagcccaatataagaggtcagcaacatctcttgccgatctacattgtttcttattcaataaacatttattattgatctaccaagctcctcaccctgctaggtataacagtgtgtgtgtgtgtgtgtgtgtgtgtgtgtgtgtgtgtgtgtgtgtgtgtgtaagctcctcaccctgctaggtataacagtgtgtgtgtgtgtgtgtgtgtgtgtgtgtgtgtgtgtgtgtgtgtgtattctaccatattctgggttctgggcaaaacagcagattatcaaagtcctaacccacatgaggcttacggtctaggaggggtaagaaacagtaaaccaagaaacaaatgaatatgaaatatgtgaggtagctatggggcaaagagtacagcagggtaaggagaaaaagacctgggaagaagagagtggtagctggagtggtaggagattttgggggcacatgtaatttaagtcttcctctgaatgaggtaagggagcaagccctacctacgatcatctgagaaaaaaacggttcccagcagaaaggacagacagagcaaagtgcctgaggctcagctgtactggagggatggtagtattgctgctactgaaagggcaggcagagtgactcactggggagagggaggcaagggtcagatcacacagcacctggaagtcaccactaaaagtaggggctacaaatataaatgagactactcaagagagacagtcttgtgaagagtttaatacgtaaggttacattaaaaattcactgcattaaaagcagttgatgctttccctaccatcacataaaaagtatatgtgcacaaacagacagaagggtgcatgcgctgaattttatatagtctaggaaacattttcacattggttgtttcagtcaaatacaaagaagttacagaacagcatcgagtacctaagagagaccaaaagcatttccttctgtaaagccctgcagctgagggcttacatccgcctggtccaatcagttcatttccaaacaaaggtaggaaatggctgcatcctagtatttcattgtggactcatgactcagtgctttggaacttggtatctttgggagtgagtgtctattctccacgtctcttgccacagggggaaaaaggtacagataaacagtaacacaatttcacccaaccgagatataaatctgtgggcttctccacccttctcaaaaataaatgaatgaatgaaggaaattcagttcctgcttttttttcttcccttctctgttttgtttcctaattcccaggactccctggtgtctcctaaacagcataaggtcaactgatggtgaaagtacatcacatgataattattcaaaagctgttatgttatacaatatagtttataataggaaaaggagttacatttgattctgcaagagcagtcggtaatatgcccattacatagggattctaagaaactaaaattaagaaatttgtcctaaagaacaaattgattctcctccatcatttaaccaaaaaggtttgtagtattttgtattcacaatgttacacaggagaacagtaacttaactttgaaaactgttttcacacaatggtcacaaagaaaataacacataaatcccattaggtctttttgtaaaaagcttccataatttccaaatccacggtgtagagaggaaaagaggaaaatggcatgtgtatatgttctaagactattacttcaaatgaataaggtttagaggtatacttaacatacaaactgtttccttcaggaaaaagtgcaggaactcctggatagacacaatactcatttctgatgaaagttacagaagaaactaccagttgtgtatgatctaatactacaagtcacttattatctatgaaggaaaacagaaagagaaaagataagaaaacaacatttaaataagaatgagaaaggaatctctgttctaacttaaagatacataaacatataaatccaaatatgagccaaattattttataatgatatccatgtgatcaatgaggcataaccacaagaaccttacacgattataatgagagaagcttcgaaacaggaaatttctatctacaaaaagtacaaattattttcagaatattggaggaatctggggttttctacccagcagaataaattatgaaaacagtgaaagataccctccagagggagagagtgcaagagtttatatgttaaagagaacattacatttcacttttccaatgtagaaacaaactgaagaaaatttagaggggatggtgaggatgaagagaaataaaatcataaaaaggaatgagtaaaaaatgtaataaaagaagaggaatatggtttccacttatattagttttgtccttccattaaaaattataccttaaagtccattactcttgactatattgccaatttctcaaataatacactggtcaagttccaaaatttcattaaatatataaattgcatacataaaagttcctgtgtagcctatggaaacattttaaattttcttcagcaaaattgggcctaaagtttggaaaaattcctagagagtgaaattaatctctctgtccccatctctccctctctccctctctctttctctccctctctctcaatagataatattaccctactatatatcctgccatatatctttatactccaatttcctacctagtcccctattcagacatgcataatgcttccattttgaagcatatggctggggagccaaaagaatttaaattgccttcaaaatgtgcatcgcattataaatggtgtgaaaaaagatcttactattcagctctcaacttggagcataaagcaaagaagaagcaacacaagactgcttcaaactttatccaaaaactcaacagcttcacttgtttatagaggtacaaaaagtatgcgacacagtttataaaacaagaacgatgtactgtatgcaaaagtaaagttaaaagcaaagtatagtaacagccctatctcgttacaaacacttggcagcatgtctaaagtaccatggtcaaaaacatgataccgtctgcgttgtacttctgccagaaagcactccctaagtccaagtctctttagccatcatcaccacctcatttggcaaactctcccaagcctcagttcatctactcaaaattactccacagaaagcagacaaactctctagctttgtaggctgcaagtatcacaatgaagtagcattggcaagtgacagcgtaagatggagctctgaggttagaaagccaggaccaactaaactgtatcctcaaagcttatttgcatatcaagttgagcagggctgtcttcattttggtaattcagggtttcttctctactctcacagtaattccaatgggtctttctgaatcagccgcagctgagaaagaaagcacatggcaagaatacactcaggcaccgaataccttttaggcaaatgaggggcaaatgtattcggcaattacctgccatttaaccatttctggccaggtcttttgaataattccagaacctcaaaaactgcctcaatagttatgtatgcataacggaccaggccattaccaaggctaagtaaatacaagaatatgcatcaaggtttaggtaataagtagataaatagactatatcagtatcaacatccatatctacctgtggcatttataactaaaaaaacagcagttcataatacataagtataaatgtggcagtgaaaagatgactgataggacagaagtagctgcatgaattattaattttcctagggcacgtaagaattggcttccaaatttttctttaatcgactttctccaaagtagcatattacataattcaaaaaaaaacagatattgtcatcttaagtttacagcttgccatatttcctagaaaataaacaataattaacaacatatctcatagttgttccctccccacctttcttcaagaaactttacactctgaaatgtagatacataagctacttttggatcagggcccacaaccatatgcttccaaaggaataatatgtacaggttagtctggtgtgtaccagatgttaaaaaaaagcaaattcaaaaacagaaatatcagtattcaatgcagaaatatattttaaattaaatcccattcttcctctccttatagacacagaatcaaagaaagccaattgtatgtctaattttttaacctttttcctgaacaaaaatcccaatttgactcatgactctagattctttatatacataagatcacaagacaagaaatggtcatttataaattatcctgtctcagagtgagcctcctaccatatgctgatattcaaccagaagaatttgtttgaaaaggcaaaaaaaattccagaagttaagcctataaggcaaaccagccagcaaaaggcgacagagtccacatgtctatcagatatttaatatgttaaacctcaattaccaaaagttttaagattctctgtaaacataactagtgagtctttatttttcagatgattctgaatgcaaaatgagcacattatctgcacattgaaagaatttatgtgttttttcccacatatggaaatatgcatgagtattaaaaaacaaattacaaatatccactctctagaagtttgaaaagtctaaagtttgggctgtatttgctttttccattgcaaacctacaaggattccttcagacttacaaaagttattgcaagaagtcctgcaggaagaaacagattggggatttagatcacccatgcctaactttttcagggcatcatgatctctccccttgttctatacatcagagatgtcactgaagtgaaagccaagttttactttagaatttaataaaaattgattaagcatcacagagcacaaacaaagctgctccataaatctttcaggcctttttgtgctaggaagaaagcaagcactgtctgctgaagcagatgacagatgctggcttaaagataagtattatttatacttctgtaccagatttcttcttatgcatatcttatcatgcatgggtatatgatcaacaaagcaattattttatatcagtcaaagacattcaaatgtaccctggctccataggaatgctttaaagagttcaggtctagggttcaattaaaccaagatggagagaaaagaaagtttggaaagaaaaacaaatattgaaatggttgtgatttgaaatgtactttcacacacaggctaatgaatatatatgtactgaaaataactttgttctgaacatatgcctatgcattttaaataaatgatgcatgtttgaaagataagagggtttaccaaatctaaacacatcaagatatatctatattaaactgcatttatttgtacagtatgtcggtaaggaaacagccccctgaaagaaatccaatagttatgtaaagagatagctgatttaaccaagtttgagaacattttagtcatcaagactagagtttaaaaatttaaatgacattccttccctccctccttagaaagacagaatatatgaaaaccaatcacttaatgaaaattcccagaggtttctttattgttttacttctagcatatgaagtggaaaaaagataactaattatttgaaagagaagaaaaagcaacttatattaccttctcaaaaaatatataatattctgcatcataaggcatttgaaggtggagaagctggcatgtgattccaaaacaaatctggataagtaagagaaataaatcaggtgggctgtcttgaccattttcttctaccccgattcctaagtcccttgagaatctagaagaggagcaggtttgggggtggaattgttttgttttattgtgtttcatgagggaagacaaactggaaataaatgagttttcaagtccagccagaaagtcaacctatggttagatttacctaattgggtattttttaaaaaaaaagtacaaaaacaaaaacctgtgctcatccatttttttatggtatcttattgtatttcatttttttctcagcatttttcttcgtaaaagttcgtcctaagaaatcccaacctcgtctcagatagcctaaaaggcagaaatgttcatccactcaaagaccaggaaaccctaagctgcatgacatcatgtgggagtaaaatgactgagtgagctcaagccaggatccttgctgctggagggtttcctgcacaagggctagctgaagccacagatatggctgcaactgcattaaaatgacattggtagcagaattaaactgtctggtttcatggaaattaccgtatactgtagttatcacgtgagaattagcaatgcactaaaataggacacacaaatcagtactattatgtggtaatactaatctatcatacgcaataatttttctttcctgaattatatatgaaaacacatccataagggtgtagcaattatgagcaaatattttcaagaatggctattgtgtatgtctcttttaagcatgcaactccacatagaagcactaaacaaagtaagtgcttaaagatattcaggattctctttcctatttaaataatcctctctattatataaaaattcagtttgtacaacataagcataagaaatttgtagaggaaatgataggtcagaatggtttttaaatgaccttatagtagaaaacaaagttaaaatatataccatataccagtgcagtcagatatattggagtcactaatacattctgaatctgctgattaaatgagagacattcaaaatgaatgaaacttacccacatactttctcatccatgtaagcaggaaagaattacatttcttctgagctaatgggaatgagtatagtaagctttaccgataactttaatctccacaatctccatagacagatccccaccaaaaaataaaataactgcttagtaactttgcagcatatcaaagttcacaaaccatgcccagttccaatacttattagccgttggccttagacaaattactgacctctctgaatttgaatttgtatatctatttaaacaaagataataggctcaaagtttgaaacaaatgggatatgtagaaaaaacattgagcaaaatgcctggaacacaataagtactaaaaaaatagtaaatactattattgttgttcttgctactgttattattattacacagtactttcatgataaaagtctctggccatacatcagcctagattagtgcagcatgtgcctaatttctcatctctgattccatgacattggggtgtccggattctcctcctacttatctgacttctcactatcattctcctgtattaactccaattcttctaaaagtcagcattcccctggttctctttatcaccctctgcaacctcaatcaaactttggcttcaaaggtttgggataacaacagctaaattcagacctgtattttcatttgcctgtcagacatcaacacttgggtcatgcctacccaacctagaagaaaaaaactgaacaactcacctccaaactcagtggttcttccactgcctctgttaaggaaactaacatttacccaggtgacgaaattagaaacatcacagtcacacccaactccttctccctacatccataataatatgcctccttctttctattcctaccagtacaagctttcctatgtccttcttgctgctctcctgactttcacagaagtcttagcttggttatgttcaacaaacaagaacacctaagatatgccaagcaccatatactctgaatgcaaaccaggacagaacaaaacaaaacagaaaaaaaaaaccaacggcaacaaaaaaaatgcaacccttttgctctcaaggttcttcaagtagtgggagagatacgtaaacacatgattatactataatgtcatacaagcaataataagtacacatggccgggctcagtggctcacgactgtaatcccagcactttgggaggcaaaggcaggtggattacttgagatcaggagttcaagaccaacctggccaacatggcaaaaccccatttctaccaaaaatagaaaaatcagcagggcgttgtaatgcacatctgtaatcccagctacttgggaggctgaggcacgagaatcgcttgaacccgggaggcagacattgcagtgagccgagatcgcaccactgcaccccagcctgggtgacagagcgagactctgtctcgaaaaatgataataataataagtacacataaattataaaagtgggacagaggagggagtgattattccatctagacaggtcagaaatgagtttactgtaaatatccatcactctagaggagtgttttgaagaatgaacaggaatgtgtggttgcacaaatgtgtgcaatgaacaggaatgtgtggttttcctctctaattcctgagaattagagaggaaaaggcattctagatatcagggacagcgtgggttagactctaagctctctaatcaacatgtttacacttaaaactcgccagtctaaaacccagacctaattttaacactttcccttttccataagaccttcaagggctttccactgcctctaggataaaatccaataccttgcattggcaaggcactggtattctaaactccgacccattagatgggaggaagctcccactgctctccacatccctttgtcttaggtacaggaagtcactacaccttcatacaggactgtgctccagccagccaccaaaatgcctctctgcccttcaccctgcaaaatcccatttaccctgggatatcaagtttaatttcactctgctgaagtccttcctaatcaaccctgcattgtgtcctcctctgagccttcagtccctttgttgatagctctatttccacacatctcatacatggatttgtagagtgaatgcccatatgtttgccatatcatttttgaagagcttttgctgtaaatgagaacttcagtgagtaatttccaattactttcccccaaattaacaggcaaatattaggaaacatcctatgccaaaccctcttatttggtgccactgacagtgctaacaggctagagtgaaatatcaaggtatatgtgtggttcacagaaaaccactaatatcaccctgctattgactgaactgtgtccctgaaaatgcatatgctgaagacccaatccccagtgtaactgcatttggagacagggtctttatggaagtaattaaggttaaatgaggtcataaagttgaaggcctgttaaaacgggtttagtatccctacaaagaagagatgccaatgtgcctgatctctctctctctctcttgctttctttcactatatctctctctctctctgctttctgagacacaataagcaggtggctgtctgcaaaccacgaagagagccctcaccagaatccaatgatgctaattccctgatctcagactcccagcctccaggactgtgagaaaagaaatttctaccatttaagccacccagtctatggtattttgttatgacaacccaagctgactaggacttataccatagtcaagagaacttgaacagtccacaattaagtggtgagactgtctctggtatgatgcacaatgtatttaactttacaaacagactcattaatctctcaaaagcttaacactgtcaccattttacagacagatccagctaatggttggaggccttccatgcgccatccaataatgcagggagaggcagtgaccatgcccagaacaggattctaaagtcctgcctttcaaatccctgacctagaaaaaaggactactccatttctcacaggaaaatgtgccagtcatggaggcctacatggcacgtctctgcactgctccaggtcaggagggccatctgacactgcacaggcaccactgcagggcaaaaggatgatcaagcatccaaaggccaccgccaccactgactagctgaaaaaccatgaaaaagttatataatttcactggatataaaattaaagcaagattttaatacttaccttgtagggtcactgtgaagatcagaaataaaatacagaagtacatggcccactgcttggcatacagtcaagactcagtaattagtgggtactctgcatgctttgatgtcacctcattaacagtttcacttctacctaaactaaaagcaggaacagggtgttcttattattttttaaaatctacagtagatatctgccctgtttgtttaggtgttgtctacacagtatctactaattttttctttttttctttttttttttttttgagacagggtctctccctgtcacccaggctggagtacaacggcataatcaaagctcactgtaactctgaactcctggactcaagcaatcctcctgcctcagtctcctgagtagctgggactaaaggcatgcaccaccatgcccagctaacttttgaatttttttgtagagatggggtctccctatgttgcccaggctggtcttgaactcctggcctcagcaatcctcccacctcagctctacttctttctttctttccttctttcctcccttccttccatcctagcaatcctcccacctaaactgcccttccttccttcccacctaaactgccctgccctcccctctcctccactcccctcccctcccttccttcctttcttccttccttccttcctgtagccttggtctcccaggctcaagtgatcctcccacctcagcctccagagtagctgggattacaggcatacaccaccatgtcggactaatcttttatttttttgtggggatgggatctcactatgttgtccaggctggtctcaaactcttgaactcaagcagtcctcctgccttagcctccccaaatcctgggattacaggcatgagccaccacgcccggcctctattactttttgttagtaataacaataattttcctctgggaagccactcttccccactttctgagatcatgtagtttgggtgtctcgtgatcctcctctagctcctctccaagaacaggcaggagacttaagcatagccaaagagaagaaagcaccagttcagcaacaggttcaggggtagtccaaggagatccagcccaggaacgtctgcagggactagtgaggaagggaacattttcctccccactgggtttgcttggctaatagaatataagccttcactgtggaaagagaccctctttgcccgagaagtaagggaacaaagagaatggcataggaagagaatcagagaaacattcccagttacatcatttgaacacctgaatcaaactgtacctgcagataaactggacttttaaattacatcagagaataatctccctttctcacttcagtctgtataacttcagtttcttacacttgcaattaatatacaaaccaaatagcagcaagaatttgacacctttcagtgaccaaaaggaccactgaaataagaacttagtgataagaaatacctttcattaaattctcactgtacgtcaactaaatatttcaaatttagtatttccaattacataaactgaggatgggggtagatattattatctctgctttactgataagcaaattatgagtcaaagagcttaaacaaattgcccaagtttaaatagtaagtggtggagatgagatactacctaagatttagcttttttcttttcttaagtattaccaagaaatagtattactcggaaatctcacatatttataagatccctttgttttatgctcttatagcatcatgtgccttttcaccaaatgattcaccacaattgttcattctacttttttttaagattgcgtctcactgttgcctaggctaaagtgcatttttgtgatcctttgatttgggaaattgttttctcccattatcttataaacttcctcagtttacgtctatcatgattattgcatatcattgtgcattcactgacaatagtagatacttagcaagtactgtaaaaaaatagaaaggaaggaagagagagagggagggaggggagaagaagagaggaaggaaggagagtaaagggaaaagaaatgaggaaggagggagagggcagaagagagaatggaaaagtgagaggggaaggtaattccacaaccccttcaccacccttaagccctttcttgagataatttagggcctagcaatagacagtggtgacactgtcctcatgcaaagggataaatagaggaattccggaacaaggcaggaatatcatcataaatgccaaagtcttgtggataccatttctgactcccccaaaaccccacacagtaggaacaaacatgataaaaagtttcacctattcctaactccttgttcaaaacccctcgagtctctttcttcttttcttgataagtcttagggtaacacaccaagttttaaaactcagttacaaatttgcccttaactgagcatctgaaaggttatcacgcaggatttttagctctaacagggaggagggtcttttgagtttatggcctgttgagcacttttgtgctgagtcaaggaagataagaggagtgggaaacaggaagaatccattagacagtgtctgtgcatataatatctttttttgttttctttatgtaagttctctgatggacaataatgtccccaggtagctaatgtcacaaacctcttaaacatgagagagaaattgtaccatttctcaaaggcagctttttggaagggaagatcaaagaggaggcagaattaaagccttagctcaaaaggaagacagatttccaaaacttcagcttttgccattaaaactttcaggtgtgtcccaagataaatgatacatcattggctactacatccccacagtggcctcactactacctcaatttgattttgtgaaggagtgctgaagcactatcaaagaactttggtgttcccttgcttatgtcatagttacctagagaaaagagagtatgccttaggaaatattccagtttaaagcaacattaaacataccaaattcatcaccgggattacagtatatagaatattttaagtcaacctgtatatctctgtcaattatattttattttaactatgtgagagaaggaataaaagttactaaggtatcaccttttctagtaaaagataaccaaataaatccattgagaagtcacgtttattcaaaagaattggtttctctggacttatgacatttgagtatagtacctcctttcttctagaatactctgagttaataaaagtttttttgaaaatgaaatccatgggtatgtgtcataataagtaaatactaaatgcttgtagtttttcagagacttttcttaggtgatgtctattcctgaagtatgatcagaatgcaacatctaacattttacataattaaagattatagtattttgttttaaaaagcaaactagaaacctcaagaaaaacctatccactggcattcctttgaaacatacatacaaagaactttacggtgtttttccttgcctttgggtgtttgttttacaagagaggaactccaggtgcaatcactgaatgaggaattagaacctccctccaagctttcatctgattgcataccaacacataacgaaggacatgatatatttacagtagctaaagagttaatctttagcaactctgcttaaaaatcctaatggcagactgcccatcattcttttagacagagcttgtcagaaaaactagggcagcttgtccagctcagcagtcaactgattactagtgaactcaatggggctcccagccaacccctgagattgctgccagccccttgggtattcaaaggccaagttccaatgtggtttactttgccagaatcacatgatgtcagtgctattttctcctgaccagaataaccagtcattcaggttactgcaagtggtatcggtgaactaggcatcacttcactgttagaggtcacatacacaccaaggctctgctccttctcaccacggccgaggggccactggagcctcctgcaggaggtcagctaatcccagtttgtcagttccagccacccaaatcctgcacgggcatcctgcacaccgcagtctgctccaaggaccaggaattacacaggcgtgctgcacatggcacacttagagaacaaaacaaacaggtccaacttttataaagaacaagctggagaggaaaacaacagaaaactggttttggctttcacttatattatattactcgaggtttagtaggcaagccacacaaattctgtgggatttagtcaccgttatccacctatgcccacattctttgcatggtagtaagacattaattaatttttacatctatcaggagatttttcagttgctacaggatttgcaagggtacatgcatgtaaggagtagccagtttttaaaactgtgattacccttatctttcggtgagagaaagtatttcactccctaatgcagagaattaaaaaacaagatccactttttaatctttcttcctccagaagaaaatacaaacatcaggaatagcaaacgggctgatatggctggtggactctgttttcaaagtcttgaacatatttcccaatgccttaaaaaccttgaaatatttttaatattcctcattacttctatggcactttgcatttatttatatgaattcattttaaaaactcactttaaagagactaaatctttaaaatatgacatttaaaaatactgtagattttctatatcattatatttatagtttttcatcctttcttttttctgtcagtaaagtaataaagttttaactgctgagaaataatgggcagcaaggtaaagaagtgtcatgatttttaaacatttgtatttgttaaaaaaaacagaaactgcttcagttataatatgtaaaagaaaaagaactgtaatgactgcagtaactactattacgtaaaagacaatacatgtttcagaaataatagagtcaatgaactatctgttactactggatacatccttattaatattaccttggggaaacctctaagcaaagtgagaacaagatcacgagaacaggcgtcttaagatctactgatgcagctttacatgttcctgccatacaactttgtggaggaaaaaaaaataatgtctttccatctcctgcagcaaaatattgcacccatgacggtcacccgtattaaactcaggtaaacttctacaagaagtccatctgtcaaggaaattgtacagtaagaaaagactggtgatggatgcatggaaggaaggaaaggagggaggaaggaaggaagggagggagggagggagggaaggcaggttggtttctacaaagaaaaaaaagaccaaaaacaattatttttacatcaatgcttcataattttcattcattccatccatgaagaaagtttaagcagatctgcaacaacttcaaagccaatgttatcatgtttttcaatcaaaatcaggtgctacagttagtgttccctgatggttacagctcatctttgactattcaacatgtcttttgtcctggtcttttatttccttctcagatgcatcatatcctactgctaacataacatctttaacgaactaacaaatgtttgaaagaaagagacttgctagatacaagttctctggtgcaaagggactgagtggtcaccaccaattagattatagcgggataatttcacagttctcgagatgattgtttcaaggaaggctggaaatgtacagaggcagaatagcctggaagtgtgtggttttctctaagcagaccaaaacagcccacaaaactcccagaaggaaaaaagcaagtgagatttcgatcctttggcaatgaagaaataatgcacaaataaaatgttttagcctagcacaggggctcacacctgttagtcccaactacttgggtggctgaggcgggaggattgcttaagctcaggagttagggaccactctgggcaatacagtgagaccccatttccaaaaataattttttaataaaaaaaagaaaaaaatgtttaaaatgaagttgtcagaaatactcttttgagactacgtaataacctgggtgctgcctctaggtatctttgcggaattgttacagtaagtaaaactctctcaagccaacattcatggctctccatgaagtaatctctatttatttttttcacgtggcctccagcacatcatgggtcttgtattccagctacactggataacttcttgtacattttcctgccctttgacttttgctcatgctgttcccctggtctaaatgcctccccagcacttgacaaaacccgtcttttaaagtcagttaaaaacataatttctcaggccagtcatggtagctcatgcccgtaatcccagcactttgggaggctgaggcaagcagataacttgaggccagtagtttgagactagcctggccaacatagcaaaaccccattctagtaaaagtacaaaaattagccaggcatgatggcacacacctgtagtcccagctactcaagtggctgaggcataagaatcgcttgaacctgggaggtagaggttgcagcgagccatgatcacaccactgcactccagcctgggcaacagagtgacactgtctcaaaaaaaacaaaacaaaacaaaacaaaacaaaacagcatttctccataagatgctccctccacccctagaaccagatatgagctcctccactgcatctcagtagcttcacatttatacagtacttctcttaaacactgacttgatatgggcttgcgttacttactgatcttatccctccaccagacataagcacataagcatggagacacgcatcttcagggatgtgcactcaataatcgtttgctgatttgaagtgaaatgatgaggctaatttattttacagtactcccgtgcactggttctctaatagctgctcaaaggccctccactgatccaaaagcccatctgctataatattagtgttaataatgatacataggttcctgagataaataatttaattatcacatgcttattagggtctcaccaagagcagagccatttacctctttatttgaataagacttctgaaaaatgctttgtagttgggattctgtgtgtgtgtgaatctatgcatgtgcatatatgtgcatttacaagcaaggtctagaggcctaaataataataatgatcttttgctcctcttcagtgaacttcagacaagtaccttaaagctacaagctttaaagtattagcttatgaaagcgccaaccatgcttccaaatttcaaaacaaaataaccttcgctaagtcaggaagatcacttgaggatgggaattcaccaccagcctgggcaacatagcaagaccccatctcttcaaaataaaaataaaaatagccaggtgtggtggcgcatacctgtagtcccagtttcttgggaggctaaagttggagaatcacttgagcccaggagttcgaggctgcagtgagctatgatcacaccactgaactccaacaaggatgacaaagtgaaaccctgactcaaaaaaagaaagaaagaaagaaaaaagaaacttggctgaaccatgaggagttaacacttggacattttttgattctgcaactgtaaaagaatcttgctgaatttgttgaacttgtgtctctaacagattactgacatttccttaatgtaagatcacctggggattaaatctcaactgtagcacatatcaatgactgtgagcatctgactttaccttgttttacaattctcatgaaatggatgtatggtcaatgactgaggggatgataaactttatattaaccaaacatgatataaaaatccagggcatactgatgaccagatatgggctggtaagaattagttctaatataacatggacatggacatgcttcagtttatataaattgctctataggtagtgacagattaaccctcctaacatccttaaaaaaagataataaaagttattattcacttttattgatgaaatacttggagtgtttagactctcacaaggtcactataaataaccttttaacaatccagctcactgatgagtcttggtgtgttttgtgaagcactcaactgactgtgagaatcacatataagagaaatgatcaaatagcctgaatgcctttggaaaacattgaattcaactctgtcctgctccagaatccacacactatgctagcatagtattactgaagcgcaaaacaccatgctagcatagtattagtgaaatacaaaacactgtactcaaggcacctagtttaaatccaccacctattagctgtgtgatcttgagaagtcccttaattctccctcatgtgcaaagggaagctaccaatggtgcctgccccacagggctattatgagtataaaaatgagacattttatgcagcttctgttttaccaaaaatattcattttgacccactttttctagaagcctctccctctaacaatattcatatgtaaaaccaacaaaaacactaatcaaattccagagagattgaatttcagggtgagggaggtcttactgcatttttgccttaataatctcagtttcatctttcattccataccaaaacatggttacagggaaactatgttctaagaaaaaaaattattaattatatacccattctgcacatttagaaataaataattttccaaaaacttttacctagacaagaacccctccttacaaacagaagttttctctttagaccaatttcactgctaaccataaagaagaaaacatataagtaggatgagatagaagaaaaatcagaaagcagagaaagactaattagaagatagagaaaaaaaggaagaggagtgaaatataatattcatattctagctgccaatccactaacttccaaaaaggaaagtgaatatgccagaccattaaaatatttcagcaacactagcttgtttggcagtcagagtctcagaaccatgagaatcacagttacttaatcactgtgagctcataaaactggacccaaagtgacaagaccattgggtgagaagggtgagagggagctgagcagggtgatctgctccaacaatgcaccagttccagaggtcctctgcagaacttgaagagacagcacagcatcctgaggccgttaacttcctgactcctgcctttgaaatagaaccaggaactgagcttccatggcctagtttgacctggctttgtcactaccccagttctgatgagattatgatctgctaccctagaactaagcagaggtgagagccaagatgcctttctatggcctagagcacaagaagggcccacatagtaacaaaaacactgtcacttttatggattaggcagtattgcctaaaggtttagcacccaaggctttaaagccagactgtcctggttctaaatctgactttgacacctactaactgtttaaccttggttaagttggttaacacagaggctcaggttcctcacctataaaatgaggggaagtacgaggttactctgaatattaaatgagatacacatatataaaactgagtatagtcctagaacatggtgcacacaaggtgacagctgtgccttattacagctactgcacagctgaaaaaaactgtgaaacactgaaagtcactcttctacaagctggatattagactgtgaattccccaggaccagcaaaacccagcattcccaatgcctagctcagtgctgaatgaacaagagagaaaacctcaaaaatctttcagtaatagaaagataattctggacaggtgcagtggctcacacctgtaatgccagcactttgggaggccaaggtgggtggatcacctgagtcgggagtttgagaccagcctggccaacgtggcgaaaccctgtctcttctaaaaatacaaaaaattagccgggcatggttgcgggcacctgtaatcccagctacttgggaggctgaggcaggagaatcgcttgaacccgggggacagaggttgtggtgtgccaagatcgcttcacagcactttagcctgagcgacagagcgagactccatctcaaaaaagaaaaaaaacgaaagaaagaaacataattctaagactaagaccaataatgtgccagctatggtttccttgtcattgaatttattaatataagtaggcagaattatttgttatcatgctaaagaaaaaatgagatttttttttaacggacaaggttttcttaaagcatcatatcagtatctcagtatctcctataaatagattttgtttaaataatacaatttactaaactgtctgagcagtgtggacttcccccatatttatgtttttagtggctgtagctgttgtggtggtcaaacattgagtgttcttttatgaacatagttagcataaaagaaccttttgatgactcgtattagaacatgaatttaatagaagcaaaggtactgcttatcatcactgagaacattcattcagatctaccacagttttataactgctctgatctaacagagcaatttattccaacatgcaatttaaccaataggctgtttaaccttggatacttattagtaagggaacaatgctttcaggattatgctgaataattcagcccttccagtcaaagaacttttgctggtgggtgagaacagcatgttgtctaagtatctgagaacatttctacacatctggagtatgtggccctgtgctgcctttccaggcctgctctcccagccagaacttcttctgccatggggcaagacagtggaatagaactatcttataaacttttttgaacaaagacagatgatgttgcactactacattccctgtgaattctttctgctgctgccaacttatagtatttttaagtttgctcctaggtgttttacagtagaagccattccaaataagattttgctgaaggttcagcatgaactatgcaactactctgagaaataatcccattatttcaactgtttacttttccattataccccatttccaaaatacgtgcttttaaaagttttacatcctctcttcataaatcaagttagtaaggatgtcattcctttttaaagcatgttgcatagaaacattataaaaacaaaatacataaacacacatgtatacgtgcacacaacacacttgctcaacttgaaactgagccccaggactaacaaacacacagtccagggctctggttactatgccttctttctaggatctggcttcatttggaggctcatatcccataccagtgctcctcaaaccacgttctaaggtccatgaaatattaataatagttctatggggagtgggggagtggtataatcaaatttgtggttttgccttaggacaaatctgaatcataagcacataaggctcgtgagaatctctttggtattgagtgaaccctgccaactattcaacattcacatctcattcattgttacatacaaagctcatgaagtgataacatttctttgttttaaaaataaaagagcactgaaaaaagaagtcaattgcttgtggtggtgatgaaagtgaagagaaagtgaaaaggcctaaggaagtgatggttcttggaagaatacagatgtctaggaaagaaattatactccaaagagctacctgtaaatttagaaactcatcattatctctggacaaatctttcataaatgtcaaagacctgctacatatcaaaatggtctaagttcctaagcatcatagaaataaactggacttgactgtggattctacttgagcaaaagatcctatggctgagtcttgggtatgaagagggagaagtttctcacataagcatgggcccatggggcttagactctggaaagacagctccaggggtactgccatacattgatgttggcaggatcttctgtttaaaaggtattggtggccgggcgcagtggctcacgcctgtaatcccagtactttgggaggcaaaggcaggcggatcacttgaggtcaggagtttaagaccagcgtgggaaacatggtgaaatcctgtctctactaaaaatacaaaaaaaaattagccgggcgtggtggcgggcacttgtaatcccagccactcaggaggctgaggcacgagaatcgcttgaacctgggaggcagaggttgcagtcagctgagatagcaccactgcactccagcctgggcaacagagtgagactccatttcaaaaacaaaacgaaacgaaacaaaacaaaactattggtgaaaaacagatattttagttgactggggcttaatgctgagaagtaggcctccaatacaacctgaagatggattcgtggtggtacaagtttgccttctgtgagggtctggaggaagcacttttattaacaggtgccaagtagaactgctgggtcctgaaagaacctacaagacactggggtgagaacacgtagagaagagtccaagtgcactgagaaaagtgaggcgcactgacttcagagaatggatctagtttctttcctgtcagtgaaaactgaagctcactggagttctgagacagcctctggtctcctggtccaccccaggatggctcaatatctgtaatgcagaggctgaatatgtataaatgcagaggcccaatccaagcactcactatgactcaccaaggacactatgaaatgtgaccaaagtcttccagacaaaattgcttttcagtcatgtaaatatccttttaattcatgttcttacttagtttatgtagcttatgtgaaactcgtttgtcactttctaaagatttacttttgtcggactccaggaaggattgtctaacttttccctaaatctcatggtgcttcaaataataggaacttttccctcctctacggttttgatttcccatggaagacagccatttaggaaagttacctgcatgcagatatatgcacagctaaggtaacatggaggtgtgccagtcgagcatatctgaactggccactgtctacctagagtgacaaacaaaatgtagaatcttgcaggatagctcagatcctaccatcttgacaaccaatcacagatctgtcttctatactgggttcaggcaaggcagcatgcttattggcctatatggggcatggattggcccaaaggacctgctttttctgaatttgaaggcactcagttcagggagctacacagatggtggcaaaaggtagccacatcattggttcttgcctctccatcacaatatgtcttagctttttaatagcaagaaacctgtaggtatactaaattggtggaatccaggaaaggaggagggaaaaaagtcaagacaacagcatttaagactgaaaaggggccgggcacagtggctcacgcctataatcccagctctttgggaggccgaggcaggcagatcacctgatgtcaggaatttgagaccagcctggccaccacagtgaaaccccgtctctactaaaaatccaaaaattagctgggtgtggtggcaggcacctgtaatcccagctactcaggtggctgaggcaggagaatcacttgaatctgggagagggagggtgcagtgagccgagatcataccattgcactccagcctgggcaatagagcaggactccgtctcaaaaaaaaagactgaaaaggcaaacttgatgaaaaggaagaaagaagaaactcaaaagcagtcacatctcaaaccttttgtttgaagataatatataccattcatatcacatttcagcccgtaataaggcagtgtagttgagtccattgtaggggccaagggaaaacatcccctttgctctctaaaagtttgttgaaaattaactcacaaaaggcagattaagaggagaaatggcatataaatttattagtgtgcaagggggagaatgcagggatgactgccccatatcccaatggggtacagatgcttatatacactccttcttagaggaatgggagatggggaagtctggatggttttaaggggacagtaaatgatttttaggggaacttaatgaacttaaagtggcctgggacaaagtctgttgggcccacacagcagacaatggtttgtgacaaatgtctgtccagatgtgttgacaggcttcagtgtttctttacatgctatgagctcagttaatggaaattcggggaaggaaccagagataattgttttattctttggtgcatccgaacttgaggcagataagggaacttcagggaacaatttcctcctttgctttgggagagacagaggattgcaaggcaggaggtggagggggtacagtgtcagagagacctaaggctgcttcttcagctcagcatgtcaaagtgccacattttggtgtatcggtttctgagccctgacactatcatgtcacttttcacttatctacacagggcactaagatgcactgcaccggccctcaccatgactcctccctcttgctgcccttctcactccaggctcctaaacacaggccacctatttgatgggatatttcaaacctggctttgattgtgagggtcagtttggcatacaggtgatttccttgtagattaagaacatttactttcttcctgctggatccctcccagagataccatcaaacctctacctacgcaattagttttcacaggtggctgttttgcctccagtaaaactactttctttctccttctgcaagtcaaagcacagcgaatacacacgaaaacatttcagatatgaaataaacatgttcataaaggcagctatgatgtaatgtatcatttttgactgatccaaattatggaatgaactccccacaccaggattaaagtgagaagaatcatttctggaagaaggagcgcaatgggattgtggtgggctgaaggctagaaaaaagggttagaattgagacaaggaaaaggagccacaatttatgctggcttataacggctagggttttctgagatgccttctcctttcgtaaattctgttactgttgacaatcctaacttactagagacagaaccgacagcggagaaagaaaagatgttcatacgcgtcaagagtcactggtaaggcagctgtttgttttttgtttatttgtttgtttgttttttgttgttgttcctgctgcaccagaccagtttcaacatgaaactggcaagttttgagatgtagctgtttctctggtcctttttctagtaaaaggctcccattttagaggcagccatttccaaaggaaaaaaaaattcaatgtcgacataaatcccttgaactaaacatctgtttaaactgtttctaggtcaggagtctaaaactgtgaaacactaggggtgcagacatgatttctttcccaaggtctccaagtactgcggcatgcacatatcctgccatattgtttaaacatctggctcacttccccctaaaagaaaagggctgatagggtgggttgttatggctttttgtcttaacctataacatgattttgttatttgtacagtctctaaaacaaactactgttaaacaaggttttttttttcccttactgcattatttaaaggtggatgtttcaatggcatttgaatagcatgaggggattttttttttttcataaaagctacgaactcaaggatgttcatgaagaaatagtttccttcagttcttccctatgaagaaaaactcttccagaagttccactttcaacattccccttcattaacaaaaccaagtacgtactcttgtttttaaaagtctgtttccatacccgtatttacctgtggaaaaagactgtgttcaaaatattaaaacataaacttattttaaaaagatgcgaagtggagagagttcaagtgcagctttcccaaaagcctggctcaaaccctgtatacatatggaattctgcactgcgacctcagaaggatctgagtggctatacacaggtttgccatctagattcttcacctttactactcaaaatcacccaaataatttgtgtgtgcatctgtgacgaagaacagttatgagcctacattatcaaattcagaattggagtttagggatagcaaaacgaaaactgagctgcagacaaataaagtggcccattcaataaaagtgaaagtatatggcgtaatccgtgaaacccaaatatcagggtttgtcctctgcatctggcagttacttatcctcctcgtacaaactattactgctcctgtgttatgtccatgtctctcctaaaacttgctggaggcaaaaaagcaaccctgaaaaagttcccagtttaagtgagaaagagtgatttcactgacagggcagaacaattgcccatggttgtcaaatataataaaaggattagagttttgttttgatttattttaatgtacaaaggaagaaaggagacaaacttcaaaggttttgcctctagcccagacttctggcctcagggaaacaaatttcctagtgaatattacagaaatatagaaacgactatttaaaattgaccaaaaaaaaaaagcaaatagatatccctactaagactagatacgtatttcaaaagtccaattttatttttccttcctctctgttactaagagaggtggttcaatatccactcctggccttacttcacctgcccagtcaacaaccattcttttccccatggaaggttatttctatatttaggtcatttgttttttaattcaaaagtacgtgcccaataaataatgttctaggaataaagaaactgactaaaggaagatactattataaaaatagaaaccaaaggaacccctactctctgtgcatttaagagcatttaggtgagaaaaagacatattactgtggtttctttaggaaagtaaaaacactcaatgatgaatttttatctatctgaggattacccagattacagtaagacaaaactttgcattaaccattcaaagggtccgatctgctatatgtcccctacaatattaagtacatacttctttcctggatctgttcttattttcaacagactctatttctagaatgtagaggagaaaaggatttcaaacagtctggaaaatatcatttttaagttccaatcagagaacgttaaagccaataaggaacttgaaaggaaatctgggctatcccccaacctaaggcaaagccacactgatagcaacccaagcagataataatctaatctaactttaggataagttaggttccgtgacttccctcttaacatgttcctgtgcctgacacccgtctactcatgaaatttcttttcaagctgcagcctaagcacattcagttattatcaacagtgttaagtgagtagaaagagattcaggggacaacatgagacgctctgcaagatcagtcatgagaacaaacccaaagacctactggacccgaatttattgatctgggaaaggtatatctaggtctcagcaatgttctttggatcaggatttggagaaaaggttgtatctaccactatagattggatattatatcctatttgcaactaggactatctatctctctataaatgatgaacagtattcagctacaacggaggtgttacagactgaatgtttatgtccccccaaaattcacatgttgaagcccaaccccaatgtaggcagaacagggccttcatatttggagataaagcctttacggaggtaattaagattacgtgacatcataagggtggggccctaatatgacagaactagtgtccttatcagaagagacaccggagagcttgcttgctccgtctctgccatgtgagaacacaatgagaaggctgccatctataagccaagagaagaagcttcagaataaaatctaccttgccagtgccttgatcttggccttcccagcctccagtgaggaaataaatttctgttgtttaagcaacacagtctatagtattttgttatggcagcccaagttgactaccatgaacaccaatatgttgaccaccatatccctctctctgagacagcattcctctcccttctaggatgaattcagttattcacttaacaaacatgtattgagcatcacctatgcatcaagcattgagctacatgctagagacacatttttcaatgagtttgcagtgtagtggagagaaagagttcatttagcaataagcaattctagcattctgtaatcagtcttatgttagggaagtagaaagtactacaagagtccatagggggaacagccagcttcaacaaggggagatcaacttactgcaataccaaatgtctcagatgggccctgaagaatgaatcagaactaattagctgaaggatgggatggtcaggcaaagggagaggatgtttggtgtgatgacagtaaaaaggtcctgagggctgaaagatgtgggttcctctcccgtactcactcactgtagacctctctcaagggtccatctgtagccctcagattccctcaagaagcaatcccttccttgacagctccactggcttctaagtcttcaataacacccaaatctgcattcctaattataaccattcccttatgctcaaacactctttttaattgactactagctattgcagcagggcatgtgatctatggcttatttaaaatccaagtcttagccaattgtggtgactcgcacctgtaatcccagcactttcagaggctaaggcaagagggtcgcttgagtccaggagctcaagaccagcctgtgcaacatagtgagacccccatttctagaaaaaaaaaatttttaaatagcagggtattgtgtcccatgcctgtgattccagctactcaggaggctgaggcaggaggatttcacgagccagggaggtggaggctgcaaggagccacggtcttgtctctgtactccagcctagacaatagagcaagaccttgtctcaaaaaaaaaacaataaaataaagtaaaacccaagtcttcatgcttccctcggatctcctcttcctcttatatgccccatttttgtggcccatctcagcattgattcagtgatgcagtcatcttcccctcctccctctcccttaccctctacatctatcatcaccaagttctttttcctcaatatctccagaatctatccattcctgttgtttctgttctcggtcagatcctaagcaccaaatctgaagaatgatttttattgatttattattacaaataatgacttaatactttaattaatcaaaagtttcaataatccactaatataaaacaaaatgcaaaatccaagagatgaaagcagacaggcagtagaaaattcacagaatcagaactggggaaaacagacaaatgaaaacaaattttgggctgtgagctttctagcatacagggaaaagaagaaaactagattgcatacacagttctcatcataagatgaaaagaggcatgccaacttatcagaaaaagaaaatttgtttcctggaagggatttttcagagaaatatattgcaggggagttgaataagggacactgaacacataataggaaaaaggtagttttatacaaaagcaaagatctgcatatggatcttttacatataaaatatttttaaatatttaattcacggtgaagccaacctaaggttaaatcatgattccacaaaagtagtctatagaggaatacagcaaaatgcttcttatagatagctttctgataattatgaaaggttaacctgtccctgaggttatctcaataaatgcaaatggctcaaagggccttttaaccaaagctatattcataactgacgtcacaaatgagtactgaaagtactaggaaactgggttaattctcatcttttcctatttcatttcctcagaaagactttcccaaaagaccttagccaacaaagacccccataccccattttcactttaatctatgtattatctatgaccctattagttttctcatagcatttaacacaatcggaaatgacttgcttataaatttgttgaattgatttgttgttccctgtgaatagacagtgagccccctgagggcagagaccatgtctgtcttgtacgctactgtatccaaagccattaggaacatcggtggtatgacaggtgctcatttaaaactttacaacctttcaaatgaataaatacgtagcctgttttaggttctaaatattcagggctgggcgcagtggctcacgcctgtaatcccagcactttgggaggccaaggtgggaagatcacctgaggtcaggagttcaagaccagcctggccaacatggtgaaaccccatctctacaaaaatacaaaaatgtgcccggcatgatggcgggtgcctgtaatcccagctgatactcaggaggctgagacatgagactcacttgaacctgggaggtggaggttgcagtgagccaagatcacgcctggccgacatagcaagattccatctcaaaaaaaaaaaaaaaattatatactgtacccaaaaaatatggagaagacaaagataatattttacatgaaaatttaaaagcctggcttaaaacgacctcctcccttcactccattttcttccttcattccatcctccactttgctgtcagaattgtcttctaaaggaccacctaaatataacagcttgaaagcttgatgatctaccctctggaaactctctaatgtggcatttgaagccctcagcaaccctactctttcagcctagtctcttacaactctcctccacttcgcctacacaggctaaagtctagtcaccctcccctgatggttcatgacccccaactaccaacatgctttccccatccccaatgacttaccttttcttgtgctgtttcctgcctccaggacccccatgcctcacatcctcgtctaacaaaacggtgctcatctttcaagctcatttcttgagtcatgagaaccttctttggattcttgtgaattctgaattgcctcctctgtactccaatagctctttttatgtatctgtgtggcattgtctactatctgtttcatatgaattaggtgcttagttttatgtttctgtttccactgctagattagattagaaactccttgagaacagggattacttcattggtcttcatatttctctaacctttagcatgctcctagacatgtagtaagcacaaaacaaatgttcactgaattagacatacccaaaattagaagtactaaagagatattgatggtgacggctttgggtttcaattgtaaacagttgaagacctaggtacagtacaaccatttattaaattacagatagtatcaatctccacttaccactaactgtgccttattagcaattgtttcatgtagtccttgtttcaggaaacttatttatgttctagtacatatgagtaaatatacattttaaactttttttttttactaacagtggctcatgttacgaggtcctctactatattaaaaacattttaatagactttgtccacagactgaacttttactttttaatgtgatatcacatataataccacatctcattctctacagattctgaaatgattcagggacttttaaatcagcatttgccaataaaaagacaaatttttcaaattctgcatcatatgtaaaactagctctttttcctttcctttttttaacattacagaagacctaaaaccttatatttgatgaaggttctaagtacaaggatcaaactataatcgtgtcatttcttcaatactttcagtactgctccccgaccaggatttagtttgccaaattacgacatcattttcaaagtgctactaatcaacagagagggcaatgaatgaattcacccatatacatctgtcaggctattgagcgataaagcatggtattgagacatatgtgttcttaccatctgcacacattacagcaatgcactgcacacatatatgtctgaacctaatgttacacgtgaaaaagaaaagcattcatgccaaccctcagtacaattcacatcacatcagttctacaattggtggctttatgttactctacatatacctatatgtcccgatttttttttcttgtgaaaaatgattaagacacagaatcagatatactctttaggagattagcttcaatcttatgctaacaaaatcgcagtcaccctcaaatggagttatggcaagcaaatttgctttctcagaactcataatttttactttactcctctgaaaactacagagcggcaaggaagttgaactgaataaaaacaaaatggcaagctatatatattgattaattttacattatatattttggaagggcaaattcattatttatacaggtgctacctgacctccatccagcaagttattcattttaacctattaacaagcacactataaacaacaatgaaagttacatgaccttacacagctgtctcaagccactgtacttccatcattaaggaaactgttagatgaccctgttgtcagaacacactaaatctgtctgaataagggaaaacaaaactttgtctccaaagggtaaaaaataataataataatcctaggcagagttcctgttcacactgtacagttactattattatttatcatttcttatttacctgtgtttttagtataaacattcctggaagcttttatactgcttgtggcacatagtcagttgcttattgccaagggaaagactttttccccagaaaggcaatctgtgcacatgctaatttgaaagacagggtaggagctgcaagtgttttaatagcccattatcaaaaattatcccttggctataaaatccccagaccattggcttgagatcagctcaaagaaaaatgagattacagaatttaatctagtgaaggggagtgagagatgagttctaaaaagccttagatcacaaaaaaaaaaaaaaaaaaaaaaaaaaaaggcagaggacagaaacaacatcagcttagattaaaccttccacacatttacctcctacaaatctgacatgttccaagactgattttaattttaaaaagtaaggtgtctctttgcaacattttaataagtagggaatgctcagtgaaaaattacatattgaggtgacaggaaacaaaacagcattttgtcttaaatttgcacaacctaatttatagcaataaagcagaacctatgagttctggtaaatgtcagggcagtcatgtccattacatatgtggataggtatgaagctgagtctccgtaggcccttcaaaaattgcacacagccgccctaatgcaaaccagaagtctcaggctgctggatgaacactcagattcgctcccatgtggatatttagagagggtctcctccacccccatccccattctcacgtatgcatgttttaagagaccaaccagaggccataaccatggaggtggctcattagaagagacctcccaccccaacaaaatctggcccaaccccctgcaaagaaagcaccagcgtcccatagaacctccccctctccccctaacctctactctcttacttctcctcccccttctcctcctccctccccacacccctccccatgagcatctgcctggcccaatctcgcctgggccagctccaataacaacatctgcttggcagcttttcaagcccacggatagttatctaactgaggcttttgtgctgtactgtttattctatgtgaagaaatgcctccttagttgaaagagtactttagaaaaactgtgcagctattagcaagtgaagcacaaggctaataacccccacctgctcatcaaattaattatgacatctgagtcattataactcagaaagaaaacacgactgcagatttgtcacatgtaggaataaacatgtattaggaccgggaaaaaaatcagaccaagagactcagctggacgaaacacatgcttccacctttcagagactggaaatatggatcctatctttccaagtgaaactgacgaagagggatgaggtggttggccagataaccacactgctgttacatggagcaaaatgagataaagtcagggattagggaacctcatggaaaacactgtaaggttgaataataatttatttagaaaaactaaaactctatacaaagccatttcacagagcaaaacaaaacatactgcccacaatgaacgtgaccctgtgtcatctggtccatcttaaaaacactcataagaactctgggtagagaatttttgtccctaggtacaaaagaatattttaagggtgctaataactttagcaaagaaataccttagaagtaaaaataaaaacttgtcatgaagttattgcatttcctaaccatgagtgcataagactagtatttttaaaaggcaaattccatccagtggccattaaaaaattacatttaatagtcagacatgtaacagtatatctcgtgatcagtaacattttgctaatatttcatactattaaaaggcgcaagtttccattatacgttttgaacaaacttaaaatagctactaacctcttttttcccccacatatttctggaacttgcaactatagcatacatgttaaaatatcttactcccaatttttcaatctggctttttgtcgtaattttaaaatgcaagtaaattttaataaaggtaaaattattttaaatagaacatgacttaataggatgatgacccatgcaatagagccatgacatttttccttgccattattttaaaggaaataaattataacatgatatttgcatgaatcataaaatgctatcatttaaaaacactcctactgaaaatgtttgcagctataaatttaaagcctcttcatcttcctgcaatatctttagtattaaaagaactttttaaattcttttctagcatttgtgctgccagtttcataaaacataaatccttctatgaaagcatatgactcttgctaaataacatcggcctgctccactttatcttctacctccaggaaagtcatccacagtagcaacagctataatcaattctcgcaaaaaaaaaaaaaaaaaaaaaaaaaaattctatctttttataaaagcaaaacccccagaagagttaattttaaaacagaacatgctacatttttaaatcctttgaggtttaatatattatgaaagcaaatctcaggaagcaatacaattagtcttttctctcggtaaacaattttgtgttagagtctaatgctgagttgatttatgtaaatgtgttacttagcctcaacttaagatataaatccagagtaaacataacaatggcaatcccgacagtctgctttgccaaatcagaagatttagtcagcctagactaaaaatgaattaagattatattgagagtgtcagtcctaagtcaagaaaacatgcccagccagggcacgccagggagaaagaagatcactcattaacgagccagcaatgctacaaagcttttgctcgtctgggaaaacatgttcccagttttaaactccacagcaaatcaaggcactctttttaataagtacattttccgtctctttccccctcatcaatcccaaaaagaaactcagcttctctgtgtattatctgtgtaactctacatgtcaaactacaataggccttgtatcctttaaggtaacatgggccagtgtctgaggtggagtggaagactcggggctgtggggagttaatgcctcccttctcaaaataactttcaagttgtctattaacaactagttcccataattacatattaaatttctttaccatgataggttacagttatacatcccaaataaatctgactgtggagtacctgccggcagatttctgtctctgtttccccagacacattgacacacagctcagagacaagctggtcaggcacgctacacagaggtccgtctgtcctcgcctaaaaagtaaataaattattttgtgaaaaatatccttagcaaggatcagtattattgtcagtgtgactttaaaattctaaaggcatgccagaaagagggctacataaaattcagcagtttccagatcatacacagtacagagattctcatacccacttaatctcagcacgcatctccacccctacttccttcccaatggtatgtggtcttgaaaacacaaatgttcacgtttcctgaagctgagctgcaaaggaaaagtctcctcccaagaggcagagctgtaggcttttggtgcccccgaaattgttcactacagtacaacataatgtgacactcaccacaattagccacagggaaacagtctttttttcacctctgatgtcatataatagatttgagatcacatcagtgagcaatgttatctacaagtatttttggaagtcttgttaaaagagccacgatactgcaagcctaacttgaagtgtaaatggtgaatgcttctctatatctcatcttgaccactactttactgaagagtgaaaaatgacagatgcaaattatttttcagaaagtagacatttccactggtagttcttcctcctaagtgatcttttcttctctctcatgctctaccccctttctctctctagcattcttcctccctacacacacacacacacacacacacacacacacacacacacgaagacatccattaatattaagaacagtcttccgtaatgtttttcagaatttctcaggggcttaggagggcggcagccgtgccaaaattacaagctttcctctagtcagaagggatgtcttttcaaagcccagccctcatttttcagtctgatgtaagtaaatttacctctgtgtgctgggctgagcagcttttctttgtcgtttttgtttttctaatagctgctgctctggcagagctattcatttcaaagggaagttagaagcattcttcactcttccccttttagattatttgcagttactgactcttctgaaatcttagatttgaacagaaacctaaagcacagcaccattttaaaacagcaaatcaccagcattcctgggatcacatttctctagagcaactatccaacatgaggcacaagaactaagtcgaactgggctaaaattgacaaaattaaagacaaaagaattatctcttttaaaaattggggcctactgtgctctgacagcatgctaaaggacaaccatcgtttggaaacattgtttcagaaccagagaagaggtggtggagttctgtttgccagttagctaaattaactgatttcttaagaaatccaagtgaactgtatagtaaggtggtcaatttttggaaacattgtttaggcaacagataagagatagtgaggttttgttttgaagttaatttacttcatgagaaagtcaaatcaacagtcatagaccatgaagctgataagatctatgataaaatccagtgggcgaactatcagtaagttcttaatttgcccacgtcccagtgtattcaacgggcttcagttggcaatggctggaccttgctcttgttacttctgaagggagttgttttacgtggacaaggccaggatcatggtctctgagtgctccaaggggttaacctctgtgaattctacttctgtgtcacatatttaaatgagtaacttagagttcaatatctttgtgttcaactaaagtcaacttcttctttatcagccaacattctcttactctaatcgttgaacacacttgaattcatatcagttctgggattttcgtaaccatcaatcataaagtcatagtaagaagaagaataaagcgatatcagtgcagttgaggcaaacagggaagaaaaagtgcacggcgccatggttaggatatcatgccaggctaggaagactctcattaacatctcctgagtcatcccattcacaagcagtatccttgaagaatgatatctgtgtatataagtgaaaaccctatcacacccaggggcttatatccttggcatcttaatttcctagttgtgagtacttatctaaaaggacatgagtataatgctatcctatatggcatactaagaaactgatgtaaaactaagtctgcaggagaaaagagatgctacattcctgtggcaattttcaaatggcactaaaaatagataaatacggcagtaagaactaagtccctcctccctcacttccctatctctatttttcttttacatttgtgtgaattcagtaaccataatctatctaatcctattatgccaaaagactaaaagttgttgatgttcaaaactctaccagtataccaaaaactctgaaactaggaaggaaaaaaaaaaaactttcttacccttaaccaaaaatgaagagtctctcaagcatatatggatagcttgacaaattaccaatttatactgaaatatgagaagatgttcactaagaattacatgactagatactgcaggggttttttgttttgtcttgtcaagcaaaaaaggtctaggtttgccatactccattttttggtatgaggtggtgaatcaagcacaaattttctttggacttaaaacatttaaaatgcagtggaaaaacagttggggaaaagatactgttcttaatccccagatctagactatctgttggggtagttgcttcccaatcctattttctcaattgtaaaatggaaacaatatcttatccaattgaaataaatattaaataagatactttaaacaaaagataaaggtgctttacaatttacaagtatgaggtataacttaaacagctaactggaagacattaacataatctacatagaatgaccttcagagcaatatggtttgcaatttaaggaatgaaaggaagataaattgtaatacaaatgtacctttctcagagaaggctgaaaggtacaacgccaaaggcattatctgcggactcaggcttcagattacctttgccacttcctacatgtgaaatactgggtaacttattgtaaaattctgtgagctctaattttctcatctttagatgagtaataataatatctatcttgtgaaggttcctgcaatatttaaataaaatactacacatagaagtatctgactttaaaaataatattcatgcgagggaaagctgatcacacgaaaggtttcttagggactgtttgccttccatatctgtcttattaatatagcttcatgcagtcacctaaatatcttcaagtattgtaaactgaattcagattatgtgcttttttaaaaagtacatcttttctatatcaagcagaaatcaggccacaaaaaaatacttctgtaaaaagcttaggaaagaataatttttcaattcaggaaatttcttcatggtgctacgaagaacttttcttgtactgaactgctatttgtgatccacctgttaaaaaaagctcaaaacacatttcaaaaacaaatagaatgcttaaactttcttaaaagacagaatgttttacatgttgtattttgaggagattttttttaaataacaagtttttacttactcatctttaaaataaaagagaaagtaactgcccaagaaacagccttatcttttgctttctacaattcagaattttgaaagaaatcctcaaatcctccaaacaagtgtaatacacatggtttgctggcagaatttattccaagcatctccaggcaatatgcatgtgcacccgcgcacacacgtgcacgcacacacagacacacacacacacacacacacacatttttgaatcattaagtcatttggaagaatctccagaagtgtgccgaggcatgtttttggtgttttgccaaattatgtgcttctgtttgtggctttcaaatatggattagacagacgcacaagcatgtactgtttggcaagtagcgacaatggtctagtctgaatttagtaatttaagcttttcattagtcctcgtaggtgaaagaaagaattaacaacaacttgtttgagctctatctttatatccctttgtcatccattcctgttcacttgccatagattagaagccaaaggaatttcagatgtcctctgcagatagacctaaagtaagggcttcaaacagggggttcaaatgtcaagtacatttaagctggaacttgaacttttactcatccttactctaaggctataactctgcttttctgagttccccattgtacttgaacatccagtgtaccctccttttttctcacaaaaagtacagatagaaattacctaaagagataaaaggtcacttgagatttctgtttctcgtgacttgaaattaccatgcacaacagtagacttctacatggcaaagcgctcacaaagatgtttctgtctcctgtgatgatctctgggggaagctatgtccctgccaccctgcctcatgctgtagtcactctaaacttcagagaccagcatcttacgaccatgagttttggtgctaagttcagaaaaattaatcctaaactgtcacaaccatcctgatgaccagtatgtctttctaattagaatcaatgcagtaatcattataattggcagtccctccccagatcacgtggagaacaccatgggaagtgcagttgacttgcagtatttgatattttcttctgttggtaggtaaaagtaatctgatgtccaacagaaaagttcacaggaaccatgaggtaaaaaggaccaaatgttgacagtggtccattgttaattgagtcgtgcgaagctacagaaagattagtttatacagctgctgttatttgtcataacattcctaacaagatacacatgttcaatcagtcttattttgcacctccaaaactgggccatccaatggtctgaaacatgtggaaatcaaaagcaacagtgtacagaaggaagaccatgtatcccctcaggctgcctcaatggctgaggaaagaaaagaggcgagcccctgagtgagcggagcctagaatgtttgggtttggaggttagtgagtaaaacatgaacaatgaatgtgggcgggaagctgggacagaaccctgttagggtcattactaaggtataatgttattgactgttttgtggggaatttagacttttaaccccaccatgattcagaagcagtgactttcttgggacaaactgaaaaacgaactgggggaaaataattccagtcagagcacaaagctaaccatgtcacttgtccactgtattttccagcagtagaacttcacgctacttataaactacaggcatactgaggggaaaaaaatgtgttaactaactttaggaaactttcactcaaacacctaagctgaaagtccacaataggttcaatacaaaaacattatcagtactatctataaaacaggtgttaaaaataaggtgtttcttatcctcaggaatttttcattttagtgaggtagggagaaaaatatatgcatacacacacagagagagagacggacacagagagagtgtgcctacaattcacaaagccctttcacacacgttatcaaaatttatcctcaggagtgattgttaacaatgccatcattatacagacggcaaaaccgaagcacaagtcccagtcactggtaatggaaccaaaaatggaagccccgtcttcccatcatatcccctaccttttctacgataataagaggatattacatctactaatcactatgatgaaaaaagtacatcatgcctggaaactgaatcctgttttcaacactgataactagattctccaagttgtatccccttcccactactttcacacaaacattttacctaagacttgaccacctgagattgagaccttattaaatcctcatcaaaaagggaaattaaggctaacagtgatcagactgctccatagagaaggcaggtcaaaaggtacgacttcaaagaaagaccctcaaggcaacagagatcgatataatttacttcagacaataaaacataaatctaatttgaaggatgttgctcatctacaactcaaagcacctaagatattttccaggatggatatttatgggccacaacatgtactgctgctagtctgtatttgctccttctgcacactcctttcacactcttcatctctggttccttatcttattatgaactggttgaagaggccatctcagacctcaatagaaggtacacttaccataaagctcccaaatgtaaacaatggtcctgtaataatgatgtgaactcagaaggtaagaatgatgtttagattccttttgcatatttctcatctaaaacaattttccttccctcacatctttcgtgctttgattaaagcaccaaaacacaatgacaacacaaccagcgggattgctctgatagcagctgaagtgcccattccaatcgtattaacttgatccaagatggtacttcaaaatgacacactttggaaatgacaggtagaatccaggattttatttcccaggaagaggaattaatctgagtcctgtatatctagtttagtacaaagtctgctaaggaggttagtcctatcctggatcagcctcactaagccagcttaggggctgatctaaaataatagtttaacaaaatgcctgtgtccaaaggctgattccaccacttgctagttgtgtgaccctgggcataatttttctgttctttcgttccctcacatgtacaaaggagatactaatagatcttgcctcatggggctgatgtaaggaatagatgaaaatacgcacacacacacacattcaagtgtttaaaagagtatctacattcaccacccccttcaagcctttacttaaatgttgccttaccaaggaggacctatcctaatcattttttaaatacctcaatcttctctaaccctacactcacactttacttattttaaaactagattagaggcagtattttctatcagattagtgctcctgtggtcagtattcaatttataacacaccttaaaagaataaggcaattcattgactagtcttctcctgtaacaagtagctcccagggaattccacttccacaggagacaacgttaggcaaggggggactcaggatgacagctcagtgtgggtgcataggaggtgtctgtggttccttggaggatgcacctattttgtaaataatgaaatttactattttacgagtagtaaaatagggaaaagaatcctcaggtatagaaggtggccagggagactacagaccgaactgataactggtttccttggaggaagactaggattcttttatatgttatatagttgtgatcatttaaaaaataagactttcttataattttctggagattcattaaactacaatacttcatatgcaaaggcaattatggcaatacataagttacatagctctttgtgccacaatatgtacggtgagccaaaatgggatattatatttttctagaaaaatcatttttaccctctcaaatggttgtgagagcagcaaaaataaaaacctaaaatctgtattgtggttgctaacttgaaccatgccaatgaacattcaaaagattaatcaaaggcttgacagttgttaacagttcaacatggttcccataattatccaattaaacatataatgcaaataatagaagtcttatgggttccatagagcatgaatatcaggctgcttcagaaaactattaactgtaatgtactgtctgctgagtctgaagaaagtgaaaggagaactagtacatttataaaggaaggcaaggagtagaaaaatagagtggagagacacgtaactcaagcactctttatgtggtcatataaacacaacagacagtggtaaaatccagaaaacaaaatttaagtaacaattattgtaaaaccaaaagaatgtagagaaatgactttaccctataattcctactggctgcactatatccacagcatacttcaaccacacttttctagcttgctgctaagttagaaacatggatgtaattacagttgttggcttttgactctgtctataaaccatgcagagataaactgctattagtgaacataccaactccatatagttgtgttttgacattataggtaaaaacaatgagaaggaaaactaaccacagcaattataaacagcatgctccagggcatgtcaggtcacttatgaccttgactaaatgattataatccttaggttgtgttctcacacgttcacatgcacacacacacacgtgcacaccccacacgtgttttttttagggaaattaattcagtgaacataagaatgactaaatcccatatttataaatgcccagaggaacaaaaaatggatgctgcataggtcaaatatctgtactttaaaaaatcttattatatttcaaaaaaccaatgtaaactttaaaggaaaaactttgtggtaagtgttcattctaaaaatattctattccacagctctgtctactcagggggcaagaagaattgcagaaatttgattcagtacaaaaacttctgctactatataaattggatttaagttacattatttggagggcaatttttaaatatttaaaccattcccttacactgataacattttttcagtaaccattcaactatttacctcattttatttgctacagacagaaatgctgcattcatttctttttgtaaaagtcagtcttctcctcccctactaaagtggtaacaagcaatatcaagagggcaataaatatcccataaatattattaaagcatgatgttctcagataaaaaatcgtattgtgtttaatgacttttcttctaatatacaaaattatttgtacaatcagtaacagtagagatgtgaaaattaaaataatgttatattacacatggtggaccactttgcaaaagtccaaattacaagtgatgtgactttctaatgtgattactcacagaaatggcagttgataaacatagtctttagagtgtgctaaggtcattaaaacagtctcatctatttgcgtatttcttcaaagtgtacttttttaatgtgcctttcttatttggtcttcttaacaatctgatcaggaaggcaagagtagttgtcctttttacagatcaggaaacaggttcctgaaggagggcgactttcccaaagctaccagactaatgagtttctgaattaggccgcacagccaggtgagctcctcatgcagggcttcagacctgaacacctgggttcaaatacttgttcctccttttaaccactgttgtatgaacttcggtcatgactggctctctctttgtctgagaactttactttccatgattataatagcttccacataagttagttgtgagaattaaataaaacatgctatgtgatgcccttaacacagtcccaggcacatagtaagtgcttaataaatattagatgttgcggctgttgttactgttactatcatcttagaactactctggctaagtttggcaaggttaaaggattaaataaataaccacataaatatcaaatccagagattaacatttagcaaacattttagtgcacatttttaaagagattaacatttagcacacattttaaaagaaaacgaactgacataactgggtatcactgtgactccggactaggggctcttggggaatgactcgcatcagccattcttaaaggttttctagcaaaacgcttgtgtatttgtatcattgcaccactcactggacacaggttgaaggaatttagattgagaaaaactatgcaaatcaaaactgtggtaaaatgcaagcatactagtgtctgtatccactttatcttggggatcaaagttcctctgttttaactgccacattccatcctggacctaatagtttctgtgtaactaactggcaagtctagcatcttgactgaaagttcacagttaagggctctgacataatgtccttgaggacaatggactcctctttcagggcaagagcagtcctgatcatgctcagggctgcatgaactcaagttgatttggcctgagccatcactgctctttttaaaggaaatgaaatcagaagagaaaaatatccatattcacgttagggagcaaatatataaagtcagtatgtttaaatgttgtgcgttggcatccaggaacactcaagaaagctctgttgcttgtagctcactgagggacagaggaacagtgtctgtaggacaaacagatgcacatctaagcaagtagaaagaagaaacatttacagtagacaggaaaagacaaaccatacaattatttctttgtctaggtaggtaggtaggactacactgagatctcatgagagttctctaactctgcttcatacacacattattataaaatgtagcttataacccttggagatgcagagaagacccttttttaaaaaatagttttactggagaagtagtgggagtgaagctgggaatatgagctgggaaggggcagtcatgggttgaattctgactctgcctcttactagctttcggattggagagttattcaagatatttaacctcaatttctttatctattatttgatgagaatacctagttccctgggtaactgtaatcattataataaataattaatggggggaatgggacattttgttgtttttactattactaatattgctaccaattaatactaacataattataaaacagtaataataaggaggattgctgtctttcagaagagaaagggaagtcatttctggatctttccatacatcttctttctcactaagattcatagccttatctaagaagaaaatcaatctttgaaaccaaaaaaatgaatgtaatgtataggaataaggggtggcggaatttttgtcctgcaaacttatgatgatttacaaacctcataaactcttatctaaataatccacaaagtgagcactcaaaattcaaaagtttttgaattaaaaatggactctgtttagaaagatgcaaccaaaaaacttatggaaactaaaatatacgttctttgttcatctatttccttcagaaaactttcataacagaaagagcccagagtccatttactcaagtgtacatagatattttatttgaaaaatatcccaacttttcaaatcaataagaaaaacagaagaaaaatttattctaagacttctaaggaaaaccattaatctagcatagggtgagtgggatagggaagatctttatcataagtcaacaatgaagaccatgatacctattcttgaacagttggattcctaagtatggctcttgacttgcttaatcctctctttaaggacattttatttgccctatgtagcctttgtggactgcacaataaacacatccaatttcaaggtctcctacataagcagcatagagcaagagaaaacaaaaaatgagaaagactgcttagtttaaaagatttgcttggaaatcactaagattttgtatatcaaaattaataaaactgaaagcagtaactcataaattaaagataaaacaaatgattctttccaattttcttttcttgagacagagtcttgcactgacacccaggctggagcacaagggtgcaatctcagctcactgcaacctccacctcccaggttcaagcgattctcctgcctcagcctcctgagtagctgggattataggtgcacaccaccacacctggctaatttttgtatttttagtagagacagggtttcaccatgtcggccaggctggtcccgaactcctgacctcaggtaatcccccacctcggcctcccaaagtgctgggattacaggcgtgagccatcgcgcccagtcctatttcaattctttttagtgtgtcaataagtgaaatgagttttttttaatatgtagaggttatttcagactatataatattttcttttgtctcttttaccctactggggccagaggaagttcattatctagaattacagttaagaaagaagtccagcgataactgcatggatcaaaattctgactctgtcacttaactagcttgccctcagagttctcatttgtgaaagggcagtaaagtatctacctcatatggttaccagggaataaaggagtcaaacaggtgactttgcaaacaatacctggcgcatagtaaatgctcactaaatgttagctaaatggcaatggtcacatgtggaaaagcaccacagctagaaaatcctacccaccttaagtgggtatcacttaagcatcaggtcactatgtaaagccttaacttgtaagattggtattatctccattttacacaagaagaaatggagcctctgggacttcaaaacacttgctgaaagttatacagttaaaaaatggcaaaaacaagattttagatagtactcctgatttccaactttttgactatttccagggctccttctagcaagttccaacgccatgcacacctagtcaccgccccttgatgatgggacaccaccagactgacatgttcactgcaaaacctgcaacaagtctgctgacatctgaggaattggagaaattattgggtgtaccccaatgccacattctattattctttaatttgttccattaagtgcaatcatcttcaggaagcctaacacatactcactattcctccaagtttcattacagttcttgcttactcacttttgaatgggagggtgctagggccactcagaacccaatgcaattgctccagttaggagcagcgcagagtccagaaatacatcctgacacatttccaacctcctgcaaaaaaagctacatgctacaagatgtcataacaagcatgcttgtatgcttgttatgtataactaccatgtacacactacaaaaatattttttgtcatacagagaaaattatacttgttcatcacaataatccattctcatgatctcactattttctcagaagttgtcacaagttttcatgtcatttctttcagatgatgtttgtataatcactaccattactctttttataacttattaagcacttaatgggaacacttaagaaaaaagaacaacaaaaattgggtaattcttcttaaactgtctctcactactataaaatctgtaaaatgtctgtcttctctatattgcaattttaggacctggcagagtgcctgatacatagtaggtgctcagtgaatagttgttgaatgaataagccgcttcactgcagacagaatggcttttaaatgccatcataaaggggcaaactgagaaagatttctttttaaatgtcagtgttcataatctccctacatgtgcacaacataatcaacactgaactaaagaatcaacaaaacccactgtatatcaccttataagagaacaaggggaagagaagtatgaaaataagaaaacctgatcactgtcatctaagaactttcattcactttttatttgcctgaggagatggggaagtacagaggaactgagaatttcacaaactaggttcaaatctatctttgggtatatgatttgtaaccttaaaagattgaaagctactttaaaagagctattataggccgggcgcggtggctcacacctgtaatcccagcactctgggaggccgaggcgggcggatcacgaggtcaggagatcgagaccatcctggctaacacggtgaaaccccgtctctactaaaaatacaaaaaattagctgggcgtggtggcgggcacctgtagtcccagctactagggaggctgaggcaggagaatggtgtgaacccgggaggcggcttgcagtgagctgagatcacgccactgcactccagcctgggtgacagaccgagactccgtcaaaaaaaaaaaattgagacggagttctgctctcgttgctcaggccgcagcgcaatggcgcgatctcggctcactgcaacctctgcctcccgggttcaaacgatcttctgcctcagcttcccgagtagctgggattacaggtgcgcaccaccaggcccggctaattttttgtattttttagtagagacggggtttcaccatggccaggctggtcttgaactactgacctcgtgatccgcctgcctcagcctcccacagtgctgggattacaggcatgagccactgcgcccggcccacagttttcattttacacttttttctgcaattacctatgaggaaacacctatattctggaagaggcatcatttacagagaacaaaatatttaaagctgggtgttattttattgttgggtgtgtcactagatcagcccattgcttttagcagcaaaaaagtataaatttgcatcaggtcagatattttagtctgacaataaaacatacctcatcaaacaaaaaccattttttcttctgctgagttcaacagccacgcttgatttttaaaataataatgatagtcatgtaaactggatgcaaaactcaactcagctaacttaagaatatttttaaatacagtatatttgcagaatattttgctttctagattttttaattgcctatagaattatcttctcaattccaaaatatcttaaaacaaattattgacacatgacaaatatatattgacaattttgattcaagattatataacataaacaattgaaataccagaattagttttaaaagatactttacgaaacattttaagacaatgtgtataggacatacactgaaatctaagagctaaactatatttaagaataatttagatatcagagttcaatgttacgattcaataataaaaaagagattaatcaatcaaagccatttagtattaaatattttggcatctgtgttaaaattcctattagattcttttattaacttttttttaacagaacaccaaatttgtcaccaaaacaaacattcccaaaacagtatatatcaatgccaaatgcagttaatttatgtgaaaagtagactcttggttatctgtttcattttgttttggttttgttacataacccctgagaaaactctgcttaacactcacctcctctccgtgacctttccattgcagtcacacagggttccctcccagaaagctccgcaaatctaactatatatagtagttggtgagagggttagttagttgtatacttgtcccactatctttggtatttttgtttttcataaacactgcaagtgaccatgaccctctcatttctacttgtaaattactcggacaaggccatcagtatttcaccgttttttcctagctccttaaaatattgaaaacagtgctcagtacagtgcttccactccataaatgcatttctcattttttcacctttagttcaaatgttctatattttccttgaaggatatattttcataaatccacaaatgcctacttctttgactatatgatgatacatacggaatcatattaaacacataccaaaataaaaggatttaatataccacatatatattatatcttgtccttttttattagtcattagattttccaaagcgtgtgtgtgtgtgtgtgtgtgtgtatgtgtgtgtgtatatgtatatatatatatatatacatatatatatatttggtatgccaaatatataatatttaccaaaatatataatatataccaaatatataatttggtataccaaatacacatatatatatgcatacacatacacacacacacatatacatgtacatacattaatatatataatcaacactgaactaaagaatcaacaagcccactgtatattgccttatagagaacaaggggaaaagaagtatgaaaataacacctgatcactgtcatctaagaacttatgttcactttttatttggctgaggggatggggcagtatagacgaactaagaatttcacaaactaggttcaatatatatttggtataccaatatttggtagttggtgagaaggttatattttcctatatatttggtataccatatagatatagatagatagatatacacacacacacatataaatacacatatatatgcacatacatatacatacatacatacacacacatataaatacatatgcacactttgaaaaaatctaaagactaataaaaaatgacaagataaggattattatccagggacttaattatattaccagtgaaatgattttttaaatgatgtgtcatttttaatgaataagagaaaacagtcaaaattattcttcagagaataatcttactcataatattgagatatttcttccaaccttatttgtgggactaaaagtcagtgctattggaaacataaaggaaaaaaataaacacatcaccattccagaccatgaaaatgtttgggattttaaagtcttagttccttgcataaataaataccatcaccttgaacactccccgctaggcaacagttacgagtatgttcacttttatctcccattatgtttgtgcctgggattgtcttatacccaaatgaaagacctcatgaaaaatggatagtagtaaagtatactggattgtaccaggaaatttatacaagaatctatcatgtctttgtactctagggaaggttatttccttaagtaactcacaaatattgaaacaggcattgtgattagctgtggctctataccattcacattaggagtggattttgagacattacatagcaattacagtatttaaatttttgccatatacctaggaaactggaaaatttgccaaatttaatatttttctccgcactttaggcatagcattgcccttaacttaaagctctgcccacaaaagggagaccaagtcttctggaaagctcagagaaagtattgcacgtctacaatacggcaggtgcggcggtaagcacttcacaagtattttctcagtttaccctcacaattgccaaataaagtgcatgcctactccagagctcaggaaactgaatcttagaaaataaaactaatttacccaactacatagtgaatagtataaaacaaacattaaaactcacagcaagattccagaatacgtgctattgctaatacagaccctgtaattcacatggttttattttactcattcttaacattaaaaatatacacataaagtggaaatgtatttctaaaacagtgaccaatcactagtgcatatacaaaagaaagaaaacaagcctcagtaaaaaggagattttcctagtttgaggaactttcttgtgttacctcagtaacagtaatctgatttgcccctaatgttctatattcagtataaataacttgcatgcattcatccattcattcaacaaatacatattatctattttatagtatgctctcataacatttctattgattgtggtttcctgtacttgcattgtacccatcttttgttcacctatttttccatcaacaattgtgcctgaaaaacatgctttcaaactttcaccatatactgtcaaactagaaattagctactagaagtagctgatattaaactttttctaatactctaatatctctgtttcaatgtgttaatctttgccttattccagagtctcttgatatacataagcacacacagggcatttctaaaacataaattatagacaactctttcattttataaaagaattcttggccaggcaaggtggctcacgcctgtaatcccagcacttttgggaggctgaggtgggtggatcactcgaggtcaggtgttcacaaccagcctggccaacacgatgaaatccagtctctactaaaaatacaaaaattagccaggtgtggtggtatgcacctgtaatcccagctacttgggaggctgattcaggagaattgtttgaacctgggaggtggaggttgcagtgagccaagatcacgccactgcactccagtctgggcgacagagactctgtaaaagaatttctaccttaacaaaaagattcattgaaagttgctttttgaaattaaattccccttgtaaatttcatatgttttatttactaaatattaaactaataaaaaaattctcagaaacatctcttaaataaaagagatatggatgtttgttttaaacttaaaaaaaaattctttaactgagatgatacatgccacacaaaggaaaagggagatgtagtaattatcaagctaatcggaaaattacaaacacccaaaagcagaacttctaacagctcctcataactagctctgaccttttctttaaaaatctgactttcagttaaaaaaaaaaaaagttttcttataacaaatctcaatcatcttttcttatgttattggaaaattggccatatatttttaatgggtcctttctgtttttcaaccagcatcaaattttggtattagttgagtgcaatttagtgtatcttccatccacacacaaaaaaagagaaagaccatggctgcagattgatttcgttagaatacttcctatgaaaatgtataaaagaaaaaacctagtctcttgaattaatttatcttaattacaaatgataatacaagatgtttaatcattatttttcttctattttcctttaaaaattgctgccatgttttcacgaaataataacctttcattattttttgataatttacgtttatttttcctcctacagcagtaaaagtaacgcatccaaagaagcactgggcctctcttagactcagtatcccaaactgtaaagtgagaagatctgtagggattttcccggctctaaaattctacaagttaaagacctctttcttaaaaagtaagcttttatctacattgaaccaaatgagttaactattggactttgaaatgagcaacatgaaagtgttactcaagagtcaggttacacattttctatttctctttaataaataaaatgtattaaaaccctaaatttaacaagcatgtgctaaactttattaagtattgcttactatgaagaggactgctctctgccaagataaccagaaaccaaattcctaggatgctagagctaacagggatagtggatgtcctctaggccaattctcttccctgacagatacagaaactgagttactgagagggacaaagtttcccaagcacctgcaaacagtaggaccagcaatgtttttctcttccacttcagcaagctgcttcaatcactatatggcgtagagtgaatctctacatcagtaaacaaaggaatggaagaaggtaattccattatcaggtcactaaataatttagagtctaatttttctttttttaatgtaaagaccttatgttcagaaacttacatttcaaagtacattaagtaaaattatgtccatacgcagatatgtcttctcctatatgcatcttaataaacaaaaaaaattatcgtcatcccctacaaaacaaaaactgaaattaaaagaaagaatagagtaaatctaaattgtatattttcattccttctaaaaggattaaataacagaattctaaatggtttgtttgtactttccatgcaatatgtagattaaccatgaaattctgtttgggacactttgacatctgttttcagtgcgttacaatgaaatctggggacttgatacatacatttgctgtaataaaactgtcactaatcagtgttttccaaaatattgcccataactattactattcagtagtctcatttgcatgatctaatattgttgctacatcatgtttttccctgacaatgtgttagctagtcccaggcacatggtcgaaaatggctgcaaaccactcaataatcccagcatttccatagtactctgtatatatgcacgcaatctgtcctagaattgaaccaacacttcatccttcatgaaatattttctctgtaactggaacacccaaggttgaattcacatccctgagtatgaaaaactcaacaataataaagaagcccatggtgaggaggaaattacgcctcatgggccttccacaacaggagacgcaaacataatccttactcagaagtcccttcaacaaagctgtaatgatgatgctttctgaacataagtgcggagtctatcattaacttagaccatttctatgaactaaagaataagactggactagactttaaaacggagtctacttccctttctctaggattagtagacagccttatcaatgccagataccaagagccacaagttcacaagatattaacacaaactcctggatattagattgaaaaactgtttccgtttcatattgcatatatctggtatgtcatgtacaaaatatggatctcaggggaaaagtaagtctgacagcccaaacatggtattcaccaaaaaacaaaaccttactaaaaacagtctgtctacctatgttgattctaaatgaattccgtattttatcagtacttggcattatattcatattgctcaacagtccaaaataatttcatcttgtcctcccatgaactcatcttaaacccaaaatatgtttctccatgcacatgttttatattatacgaatgttggacacgaaaagcagattaattgtaggccctaatgctgtgtttgttagtactaagaagtcattccaaatgttccaaaagggattaatgtagtataacaagtctatttaattactgtaagaccagtgatcctcatattactataagcagcttttcccttatttggagactgtaaatagaacagaaattgttacatgataactataagtcatatcctaaaatgttgatgctttaccatcaggaataaagaaatatgcaagcatctctgagaggctatgaaaggcaactagaatttaacaaccatgtatacgctcccactttaagtgaacatcaactttaaatcataagtgtaagcaaagcttttcaaatacattagaaagacatcatatcaaatctttctgccatcaacagcaatcccagtttacatatgtttaaaaactgtggctgcactttgtttcatgtatatgattttcgagttttgtgtatcccatgaacagaactgctactaaacaccagtgtgttatcaaaaagaaaaggaatgccacagattattaaaaattatgtgccagaatccaaacaagctaatcaatgtactgatcctgctttccgtacaccctagttaccctttaactaatggacaaacagtgaaataacttttcctattaactcctggctagaacccctaggtacgtgatacacttattataaagtgctccatataagaatatgatgcctttttaccctacgtcaatgtgacacgtgatttaaattttcctagtagggattgtggatatgagctaatctctccactttccaaacctcctgtgcaaagtgaggggtgcagttcagtggccgtagggaaacaagcaccgaaactagttcctccaaggacctccatggacacaaccaaccagagctactgaagtcaaacacggtgatcccaaatcacagtttcgtaagaagtaaatgttgtaaccattctccacttggcttccagttgttcttagcaaaagtgaagtcaatttcagtaataaatgttaacttatttcctacggagctcatttaattatttaattttcttaacacgatagaaaaggaggaatgggaaagagtgacttaaaggagaaaaattaaatggcaataaaatcaaaacaattcatgcaactgattaaacggtttgaggttttgactcaactaagggtcatttttaaatatgatactttcggactttaaaaagagtctgaaaaccagcagcatgcttttttaaggacaatccagttggccgggcgcggtggctcatgcctgtaatcccagcactttgggaggcccaaggcgggcagatcacgaggtcaggagatggagatcatcctggctaacactgtgaaaccccgtctctactaaacatacaaaaaaaaaactcagccgggcgtggggaagggcgcctgtagtcccagctactcggcaagctgaggcaggagaatggcgtgaacccgggaggcggagcttacagtgagccgagattgcgccactgcactccagcctgggctacccagccagactccttctcaaaaaacaaacaaacaaacaaacaaacaaacaaagcactatcccatctagccacatcatcatcacttctgccgaaacaaatctaaaacgtaagtgtagttctcccaaatggtggcaatttaatttttttgtacatgacagttttacacttttattggagtgcagtgaattacgagtacttgataggacaccctttacccacaccaaaattgagttatttattcagagagccactaataaaattatttgattccttcccttcaaatatacctagattgatcaataaatttagtctctggtaaatctgagacaaaaaggcttctaaaaccatacaatcattctaatttaaatgggttttaaaactacacacaactagctaacttcatgtgcctacacaaagagttttcactaacaaatattcacgcgcactacagtgagcaggacttcgatttcctctttggtatgtcttgttacctgagataaatatgaactaaatgatgaccctctgcttcatatccagtcattcctttttttcactactggatagtctccctggcagtctacattatgctattttccttcatatatagtagtaattgctattattaacattattgcttttacttacatgaattatttcatttaatcctaaagcaacacagtgaagtaggcattttaatcctcgatttacagaacagaaaagcaaagcacatggagctgaagtgacttgaccaaggtcacaaagcagataaatggcagagccaagactagaaccccaaatgtcaaattctatgcacatgatttttgttacaaaatgaatgtttgggtcttccccaaattcctacgttgaaatcctaacccccaatctgatggtattaggaggtggggcctttgggagataattaggtcatgagattggagctttcataaacaggattagtgcccttataaaagagatcccagagagctctcactcttttgctgcatgtacggaaacaaggagaagttggcactctgccacccggaagagagccctcgctggaacttgactatgctggcactctgctcctgggcttccagcctccagaactgggagaaataagctttagtgtctgtaagtcacacagtttatgttattttgttatagtagcctgaactaagacattttctgtgctctacaaaaatggaaaaggcagaagggggatatgctgaacgtcttaagcaattcaaaattcaaaggatgacagaatactttaatttgcacattatttactcttcagtctaagaataagccatctttcttaagtaattcctgcaagatctaagccccgcctttctctttttcttctaacttcacttcttcaactccctacaacacgtgtgtgcatgcgcacaccccctgctccctgcccacacacacacccaagttggataacacacaagttggactagaaactttaactcaacaggtgagatcaccttaaaattctttcgatgtaggaactgaggtagacgtctggagaaaactaaagagatttttaaatcctctgggctggctgctgttctcatatcacagtctcactgtcatctgaccccttagcccaccaaccacatctaaagccaactccacattggcgctgcccctgaggatgctaatgaaccggcagaaaggcaaaagagatattttctattctagactagtttttacaggagaagagagaaaaactgaggccatggactaaaatgagattcagagcacttcattcaaccttcctcctttgacccctatgattctggattatcaacatgattcattctgaaaagcatttaaattccttgatcttgtgaacattcctgggggaaaaacagtttaaaacacaacagtaacaaacaaacaaacaaaccagaaagaaaagaaagcctctcacctgctattttcagatattttctagatgggaatgcagaaatctactgcttttttcccaggttctagcgcctgtagcacattgtctctcatctgtcagtgtatctacacacatgtataaacagtacgcaacacgcaagtaaggaaatgtacattttaacttaaacttccttttttcctctaataatttaaaaataaaatgtaacagcttggattttaaatatttaatctggcaaatataggaaaatcatgaactataatgtcatatttggcaaagaagagtttggtaggataaaaatatctgtgttttaacattttagaaggcttttccagtattttaaaaataaaattatttcactgcttcagaagagaagaacggaggtaaaattcgctatttttgcacatgaggttttcatgaagagtagaaaaaaaacaatttttatattcattaaaataaatagttatttttacatgctggcaaaagtccccacagaaataaaatcttcatatttactaatggttctctactatgtcatgaaatttagctatttaagtcacaaaagataggattcccttaaaactataacataagatggtatatataaagttacaacattaactcatttgtaaagaaaaaaatgttggttttaccctacatgtttagtatacagattttttcagtactagtcaaagatttatagtgttaagttcaaaagtcagttgttttcacatcggtaaccaacagcataactaaatttcccacttttacctcatattatgacaataaaatatttttatcgtagcagctgaaaatgctgaaaagtaattattaaagaaaccataaatataaaaagctgaaaagtcaacctcagacgagtgtggaaaaggaaattgtgatatgtaccatcataaaacagagaaactgaaaatctaagcagaaaagatctaaatccctccaaatgccagaatactatgccccacctcttgtagcaaggagggctgcaaatttgtccccatcactgtcagcaaacaaaagaaagtcacttctacagccagaccatgtcaaacagaagacgtagctactgcagacggacgccttgaatccactggtgtgtaaagggcgggcttgggcctttttgtcagctattaccattaaagaataagaggaaacagtgacattattacacaatagaaaggtcaaacagcttgcagccattccatgacccaaacaagtcaaggtcaagggattcaggtagcaacttagccagggcgtaagttacagcgcaaatgaattgttttaacacatcagctttggtcaattaaacctaacaaggcaagttgcatcaggtagcagggttcctgacaccaaggccagaagctgagaccgacctcataaaacaaggcttttaacatagcatagcaaatttaaggtaatccaaccagaaactgcagatgtcagaataataaaatacaagttgtcctacgaaggaacattttttacacttcagaattcactaatagaggggtatagacttcatattgacgtgtcattagcataggcataaatgtaatccaccactcacatgaattacagaatataccctacttcaaataactttttcctaatatctgtgctcatgattagattttttgtcccaagctctaccattccgttagcaccaatacatttatccatgtatttttttcaaaatgagtatgaaaaatcaggtttttaaaaaaacagttcatcttcattcagcatgagactatatatgtgtcgcttaatattaatggatgcttgttaaatgcttttatgtagttttatgagagatgtgtacttcaaaattcaatgaatactattaagttgactattttgagaaatagactattttgaatggagttgaagctaactaaaattttaaaactgcatgtatttaacatgaaataattcttttcttaaaggtaattcttattttatttcgcacttgtttaaacaaattccattttcaactggtttatgcttcatcaataacttactacatgttctgaactgccttaaaataggattctgaaaatacacaacctccaggcaacttttgatagtaaaattacttcatccatcaccccatatttttaattatatagtccttgttcagagatctttaatttgtcagtgattcatcagtgctgtcctgtttaagctatcatcataaacagaatatgtgtatctaagtgttttactataaacaatatagttatgcatgtaatcatctgctttcccattttagaacaattaaattttgaaggttttttaaaaatgtgtggctttcaattcagcctcaaggactttccacctcacttgttagccatttcttccaattttctgaataatataacaaccaaaaagcccaaccattcaagtcctattagtctcactctaacgttcaatctaatacaagctaatcccacagactcactccttactacaacgcacttagttttcacaagttctctgcagtttgatgatttattctctatgccaaattctaacaactaaattcagttaaattaaccgcatcacaaaactggagttcaaggtcccaagaatttactttaaaatgagacaacataccacgttgccacagaaaagtgagcatgatcagaaggaagcgtctcttcttgctatgcttggcactggggcatgcagccgtaataactcaagtttccgatcgcataaccactagtccttgagatttctaaaattattcctccttcacaaggatggagggaaaaaggctggaaaatttgctttgaacattatgttggctaatcatttgctccgccatagcacatacataggaaaaccccttaagtgccgcaagttctactttcatcaacttcaaactggaaaatgctattctttcataaaccaaagagaaacatttacccagaagctagtttcagagccagggatcgcctttgcccataattttcaggtatttaataattgaccattttaatgagtgtttcatgtgctctttgcactctttgcaaacttggagcttcaaacaaagcaataactacttctttgattataagtccattatcatgtaagccaccatgataacagaaatgaaaactaacttatctcaatttttaagaaatcctgtgaattctgacataaccttccgttgggtccctctctcttcaggtgctgaaattctaactggccagcagtgatggcaagagcgctagtgtcagaaagcaaacggttttatatagcctaccagtctagtttttcagtttaatctggctgagtgagagcttatgaggagaaagaccttgctatattgggtatcttggattgctgtttcaaattttaagtgccaaattcaaaagcaaaaagttaatggaggattacaactttaacttccttatgacagcttcttcctaaattccaaatttagggaaaaacaagtaagtaaatgaaaaatcctaccaaatctattacgaatcttcatgtttggaagtgcttcttaggtaccaccttagaaaacagtaactttaaagaactaaagctgtagcaatagatggcctctctcaatggctcctacccagctttaagtctccaggcacaggcactataactgtgcctatcaggaaggcattcttcaggagacctgaccgtcactcctgtcactgcaatgcacagtcctctccaattaccacgattctcgaacaatgcatattattttggttcttacaaatatggagatatttggaattattttaccacacaagagacattgtgcactaaatctgtaaatccaaatacataatctaactatttttcattacaaaatttgtagtgctgtatatacagggtggggggaaggatgcctaatgctgtcagtagaatattttaccaacctttgctgcctccagaaagtggggcactatatatttttaaatatttgaaaatcataattgatgtaacaaataagcgtcccatccctccctccctctctccttctctccccccacccttccctttgaaaaatgagatcatattaactgcaatgcaagagcttagtttgccatatcggaacacagatgccaagcttccccagctggcaactggggcctcagagtttaactcttaaattgtctgttaaagctatcttgtggcagagacctcatggcatagagggtgaacttctggtgggagactgtgttttcttatcagtgagaaaattgctaagtatcttatctcacaatatatgttcccacaaaggtctcattaagcctaggagcaagacatgccaataagagcccttctttatcttgtgaattgtgtatgagccagaatgcaaacaaatgtgcactagagttcacaagttcagtcaaggacaagttgctagatgggaaaacttaacagtgctcccctaaatcaaacatgcataccaagtatttctcctacacacaaactcttatgttcccagagcatttcacagtgcagacacaccaaatcatcctagagagcagcctcattttaatcaattatgaaagcttattttttcccataatgggaaatacctgcagatgaagtgaaatctattaaaatgttaaaatacactgccaacttgcaaacaattatctacttaagcttttcataaagaaataattgttacccaaaaggattctgaaattcagtaactgtaggaagaaaataattcttagcatttgcttcctcactaatgatatgtgacaaccaggaaggcttctatttcaaaaacagtaataatgattatgacttcccctgtaaataagtcacatttttcacaacttcaaaatgtacttcaattattataacatttaacaataaagcaacaaaagtggccacccaacaagagatcataattttaagggttcaacaaggctaaaggaaactactttttcaggatagcaatgaggtttctgggctctctttaacactccaaaacatgtttaataagagtgcaaagtacagtccaaaaatcagttagggtgactcattttaaactctaatctgttacatacacgacaacagttgctatctcttgagatctttaaatgtcttggtgtgttgtgacctctctcttcaaaacgctttcctgcctcagagaaaggccaatcccactcccgccccccgactcccaccaccaccaccacccccttccttttttccccttcagacaggacacagtctggcaactcaaggcctcccataggccagacttccttctgtgcagccctttgggtagaactgctaatccttcttattaattaacgagataacggtggttaactgaaaagcaatattaacgctaactatctaggaaactttaaccaaaattattttaggcttttggttgattttcccagtgtacaaaattgtgcactgagaatttcgtaacagtgtggtgcagaatcgagaaattccagaatgactgattttacctcagaccttaacgcataggtctcctctttaaagttttctctctctctttttaaacatgtattctgttacacatttctaactagagaggaaaactgaagtcctctcaaaatgttactataaaatttgcaagagtggcaagtgagggaactagaaattgcatagcaaataagcagtgatgtgactgagagcaacagtcagtcataatgaatgcatcacatatcattacgttaggtttgtcctccacacacttgtcatagcacaccctgcatcctataggacacttacatcccaggaagctgtgctgtgcaaggcttgcctggtttttgtttggttttgtttttgctttgctttcatgaatgcagtaacaaaggcaatatggggaataggtaacacctgcccaagaatcattggacgtctttaatatctttgggaaaatagataccatttagagctattttttctttaatctgtcccagtttttttagacaaaacctaaaaaaaggaagagttttatattagctaagatttgctgcagcaaacaagcaagcagctttcattcagggattgtcaaaaactttccagtgtgcccactgcaatgcggatgccaaccaacgaatcaaaggcattcagcaactagacaaagagggtctgatgccaacctcggtgccactggcaaccattattggcatcaaacacagtgtctgccttttttttccccctcgcctggcacttcacaaacaaaatggcggttcttgtagcaacgaaacagccgaagcgcagccctctgaatcaataacatcaaatgactttatggatttaaacgcagttactcccaaatgatgtgtacattttaggtgaagtgcagggagacatttaattttataaacaactatattgaacatcagcctttgctaatataaggaaatagcaaaatggactgaattgcggtcaaccagactacatgcatagtagccgaataacaaagagatttagctttaaataaaatactgcctcatggccacgtgatgcaaaagtctaatgaactatatatcaaaaatgatttcaaaaagcataaattttttcccaaaccatatcagatgcagatgtagcactatagcttgtgtcaaagctctggtaactcttcccacatttcagaaagatgaggctgctgggcatgaagaaggaaaaaaagtgtgggttgaaccaaaagagaaagagggaaaaaagaaaagcataggaagttggtcaacaatgaaactttagtacatgttggtctttatttcgtcttccagaagagatgcagtgtgtgatcttgtataaataaccaagaggactattgacatttctagatctggaaattgtcaatatattgtaacatcactccacactgcaatgcggatgccaactaacaaatcacaggcatcctgagctaaacaaagagggtctgatgccaatcctggtgccagtggcaaccatctttggcattctctctgttctttctcatgtttttctcccagtcatttagaagtggggagagagaaaaagggggaaacgtaattttgttgctctttctgctgcaaacattacatttctcttttctgatttttctttcgtgttttcctttatacttcttttcctgatttataaaacagacttaggtgagttatcatgtacttagaagacaaataaaaagtcatcactcgcgatatgcagccctctaactgaccggagaattatcttttaaaatctgccttctttaatcaattgcactataaaatgacataattaacctacacttgacaaagaagaatatataaattttgaaaaggggaaaacacaaaagcatcctgacgtgagtttttcaaaggaagaaccaacagatgttaagagaagatgatgcactggcaggtagcagaggatacaagttatatacacaagataaaataatgaaaagttcttacaatagagattgttgaaccaacaacaaaatcaatgttttatctaaaaccatggtctcttaagagttgcttaaaactttatagttatcatgaccagtggtgcaacatggaaggcatttatgcgttttttttcttttttcaatctatctctacaaatctttattgtcagttcatcaaaactaagagagctggctgccttccccaggagtaaatgtgcatgcaggcaggcacacctcaaaacctagccttcaagcaacttaaaatgtgagcagtagtgaagtggttgcaaatcttccctccctgcactaaaaagttacatgacccactttttgaaactttacttccatccttgactttcacaacacagttacaacacatttatagtcaatccaacacatatatacagcccaccttaaagtgtcacctcctagacatctgtcaatcaaataagtgtcatgtgttactgagttttattttaggacacatgggacaaaaatattattttccccaaaccatcattatttggactgtaattcttaaatgcatggaaatattaaatgcaatgtttcattttttcaggaaaaggtaatatttctaaaagtgcaatgtccaacaccattatttaaaatcagactaaaaattctaaaatgacacttaagcctatctccaaagctacaagaaaatcaagacaaaaagcacatagtgagggcctagaattcagagtcaaaaaagtaattttgatttttttgaataataaagctcatagcagtttattaagtcccacatttatataacaaacctcaggtaacagtctgtcacctggctatctgcaggccatttttcctcccaccaggccaagtttggaaatgacctaccatctgtgacagctcaaacttcagtctacttttggtatgcggctttgtaaaatgattgttttactatggattgttggtaatgcaaggacatctatatcttgatgcatttatttgaagaaaagaaattcttacctacttaaggaaaatatattaagaaaaataaaaataataaacatttcattaactcaaatattcagtaataacatcatcttttttaattatttaggtaaaatgtataccattctccttctcaggtattttaaataataggtatggtatgcagtttctgtattctttttaagatttatcttaaaccagtgtaaccagtccactttctgttttttgttctgtaagcagcgctgcgactttcctcctcggtaagttttatgaatttacatacaagtaaactaacattattaagtgttcccaagtaactctgggaacatactataaataatttaaataataactcaattccatttaatcgacagtgaatattgcacaatcaaaagtgatgatagaaatattaaaattaagtaaatctaggtctacgtaagatatacttttgatattatctatcttaagcattttgtaatagtaaacattagttctattttcagtgcgataccactaagttcataaacaaagtccctctacctcattaattaataaggttaatacaaaaattatctaggatggtttggctattcataaataaagttatattttcaaatcaggaaaagattactagattagatgcaaaaatgtagcctacgacagaaagtatagtgtaatgaactatatttgttagactaccctatgtctttgaaaaacagtattattttaaagatacttgaaaacgcacctctttgtggtctttcttaaatatccaagcctatccaggtacgaaagctctgtgtctatttacatggctcgcacatggcagcggacatgtgagtgaaagcggacaccctactatacccagagagggtggaggatatctaggggccttgaggaccatctaactcaagccagatactctgtctacggagatttgtaggcggtgtttgccgtgctagaaaaaagaacaatctgctcctaccttgctcctgcacgtagtatgccaaaaacaaatcaagctccttaactgatactgtgatatgatgtggctggacacaaagtgctgggtttgtgcaatgtggggatttcatgagccgctctccatcggtactttccaaggggatgcctttgaacaggatcaccatgactagatccagacgccagactttgtctgcctgtcgcaggcagtcgattctcctaatcttacccttctggtcgggattggataagacacagcacgggtgcttcttgccagtcacggtgagcacaaagtcctctcgatactcctggcgaatatctttgcgcagtttggcaaggagcctggatgcccacttctgtttgatttcaggcttttcactgagaagctcatctttgactgctctttcttcatcctttgacattcgcttctcatgctttttaaagtacttgcgttttcgagcctgcaggttgaaccaagtataggcaattgcacggacatgtggaagaagtgcctcgatgaatgggtgaaattcatcctgtggaagacagaggggtgaggaaaagatgtgcatagtcagtttaattttaaaagctcaaaaaataagaaaagaagaccacaacccgtttccaattcagtacaaaaagttatacatgaaaataacattcctttcttatttaaaattatcaaaataacaggacaagaagaaagtaaagtatgcccagctgtcccctttccaccaaaattcacaggtcaattctccctcctataaaggaaataaggtttatattttgtattacactctggccccatcccccttgtttccaccccaatgccatgcattctacattctttaaaatataggcaactaactaaggtgcttggcacctaatatagtatttcaatatttgattgaccaactaacactatgcagtaccattttacaaagaacacagtgagattttttttttttaatcggagtagagctgttcagaaggcaggagcgatgccacagttcatttctcttctctgtggcacagaaacacaaagcatatagatgctcagtgtaatgccacacagttcccgcttttggagcatgctctcagcaagaggctgctggtggcacaaagagcatgcgccattaaacttgatccattttcttatcaaacgtccaacattccaacactgaaacagcaccattccaaaagtggtaactagagaaaccggtatacagtgagggaaagtgggcaaaggacacagctcgtcgtatcagtgtcctgaacagaaggtttccatactttgagcagtgcattctctccccacactaccaacgccagctcccaacacacacacacacacacttgcactctcctgctttctcacacacactcttgcatttttaaatagaagttttcaaactggaaaacaaaaattacatgaatgttcttccatcagcttccctatagaatatgcagccccacagagtccgttaatttgttcaccgatcacatgagtatagcaattattctaaacctcttaaaaatcaatctgaggtgaacaatgaaaaatggcaacttggcaccaactttacattctttgtgtctctgcatgctgtggtggggtgacactgctggtcagttactgcttttgtggaatctatacaattcatttgccatgtagatgaattatcagttagaactgtgggtgcatatatgcatgtgcatgtgaatttgcagatacatagattatagagtaccaatcttttgaattaagtagtttacctttaggctcctgcatttttcctgcctgtttcatccaagccctttttttaagggaggggatcagtgaggaatggtggataatctttacctacagatatttcaagttacttcccagtgcagtcagtttcgttacttcctgatttaggtaaaacctgtcttataagcttaggcctattactgttcaaagagaaagagcttaacgtcctgtacatgcacaccgcatgtacgcaataagccaagatttgaagcaaatgagaacttccaccaccaccacttttctgatcatattgactatactgtcagcccaacgacaaaataactctctgattgtatcccaagttagaatttacatactcatgttaatcaccctgaactacgtggaataaattctatttaacagcagactgactaattaattccattaggtaaatatgatgaaagtacaactaatgactctttaacaaagaaggtgtcaaaaatccaatatagatatgaatacattttgaagaagaaattcgaagttttaatgctacagactgcaacatgttagctgtttgcacttcagatatggaaggagtacatgtcccatccaatcaataatgtagttatcaagtgttctaacattgctgtaagtgttccttcaccagaataagtatgaatcaaaattttataacaatacagaatgctgatgattacatcacagcatgaggcatacccaaatgccatagaggaaatcattaaaccgatcagtagtttccagcagagatttgaacaattcagttactatgcgagcacattaaactaggccatggaaagagttaaaccacaatctgttctttgtgtgggaaggcagccctgctcacagcaaccacatcccatgataagacctccctatctccatacactttctgatgccatgcttttagctttcactgtaactacaaaaactttgtttatcccctttaggaatatatgcaaaaggaaagcctgctcaaggaaatgtggacttaaatgtgctttggaaactcacttcctataatcttttactacgatttattgatatgactaaaaaacacacatatatgcactcacaaaactaaaaccttgagaatgtaaagagcacatgaggtggagtgggtgggctctgtctcactcattttacccttgccatgctttttaaaatgcaatattattttataaatattaagccatgtggtaacacgtaagtacttacaccttaagtactatgttcagtgacatttcattttcttataaagacatcaaacacagttttgattaaatttgagtttcaatatttgattataaatataatctatcacacaagaaagctcaaaattttaatgagttattttaaacaaccaaaattcaaatttgaaggttgaatttgaaaattcttagcaaatgcacacagtttttaaacgttcctttgactttgctgtcaatgctgccaatattgttttaaaacatgctcttttttttgagaaataaaagtagcaaactttctcaggctgccagtttgccttattgatatcgttcagggtttcactattatgtgaattcaagtgaagcacttatttgacaaggggacatatcctccaaaaatgactgtaaattgaggtttgctgtaagtcgcatatatttctgtattaacatgcctaaatgtcatctcccaagtgtgactgtttcctaatgctgagtaacactagagtcttaaagattatgagtgacatgaatatggaacataataactgtcctgatacaaaaatatttttttaaaaggtgattaaggttttcaaatatcctaactagtagtggattattacaatagcattaagcaatcataaattctttaaaaaaagcaaaacatataagtgatttaaaaccaaacaactgtatacaaaggtaataggcaactttgctctttcagaatttttagtaaaatgcattgatgttcagtaattctcttttaaaacttcctttagttgaactaaattgacaaagtaaataacaaagttaccaatttcagatataaaaataaagagtcttaattccactaggcatatttatttttcttccgtttccatgaaagggatggataatttagaccaacatagaggtagaagagtaaatactaggtgctcttggcgcattgctatataacaacaaatcatgcaaaaaatgtacctaaagaacttaaaagcaacgaaagaaaaatatatttaatgccatcatgccaattgaaagttatattattaatggtttacattatttttaaacatatattaaatcatatgatagttcttaatttttcctttatatctgatttatactggtgtataaatattggttattgatatgctgattttgtagcatactattttgctaaacataacatttaatggtaggtccttttaaattaagattttttttctaaaacctagataccttattgcaacaattgagatacttttaaaagtttataaccaattaagaatgatactctattttgcaatttacatgtcctgagacatgtttttctacagctactaggctcttgtgatacaaaactactgatctgatacaaaagtgacactattaatgtggcctcacttttataacacctatattacctgcaaagtcacatggagcttagtgaagtgaaaattcttaagctgaaattccttccctggtgtaggccttgttttaatacataagcctagatttatattattaaaatagtagagaatattagtcatcacaagttattgttgttaagtgtgtatctctgaatactaatgtgatagctgaatgattatgctgtatatgatcccaacattccctgtctcaatgctgcaatattatctttaacttacacaaattaagataaaactagtgacttttcaatacatatttggaggatactaaaaatgcaatgtaattgctagcaatgtttctgaaaagctgatgttagaaatatagagaaatgcacaattattcaatcttttacaggtgagaataagtgatgctatactctgtaagtgaaaatcttgctttgatttgttttatttgatcacggtgtaaaaataatatcaagttaacacagcttatcagaaagagaaaaatatatccagccgatgggtaatattaatggtaacttttacaagtaaaggcaattcgttatacctgaaacagtttcatcatatttattggctattatcattcatggcttttaaaatacaaatagctcagcaactcatttttccagttttgttaaattaaagtgcgtgtttacttgctgaaaatagccatatctaagttaatcatactcagatgccaaacaaaatataaacaataaaaaatgtgtcagccaaaaagctacaggactgtatccaatcactgaataagccttatcattgttttcatcttcattcacaatttatgaatgcctcagtccttttgaatcacaatggcttctaattgtcatacaattgaaatcttaattatttgtccattataaaaatgcatcatcgtgatattagatgtttttaaaattttaacacgcccaagactggctgacacttctttatatgactagttttcatggcaatgtcaaagaaaatagttatcaattaccaatggtgacacatcttccgaaaagctgaaataagctgccccatacctttagaggtttaaaatactgcctcaaataacagttctgggctaagatattttagttactttgtcagttgttagttccctgggcagcgatgaaaactgcccccaggtaagtctgttgggtctcgccgcttttctatttgaccgtctggcttaaagtgatacaaatcgtgtttctaaaaagtataaaaccagtgttttatttcataacattattcctaaggtcttaggacaattctcaaagtcgaaaaaaatgaccttacttctaccagcattacttaaaatgccttacgagctacgcccaaatatcgtcaaatgaacaggtttccacaaaaggaacacgttctaaaaactccttaacaatcaccaagaccaactaactcgtgtcaacgtaaatactgcctttgtggtgcggtcactagaaaccccaaagtgcagcaggtcactatggaccagggtttcagatccccaaataaagcaaaggaatgggtccccggaccacaacctccgactcgattcgtcgcccgcccaccgcctgcagcgcagtccagcggcgcccacacagactcgtgctacagtcccctcgcccaagttcactggctgtttttaaaagcttagtcccccgtaaagtcctccaaagcccgagtccacctcaacgcgcgagctgctgagaggggctacgggcaccccgggcggggatgccgcaccacaacgggcacttgaggggccgcacggggcctcgcacttacaggtcccggccctgcccaccccccggcggccttgcccggcccagcgcccgcgctccgtgcccagggcgcggggctgggcgctcgcagtggccgtggcgaggggccgctcccggctcccacgccgccccgcgacgcccgctgcaactccgggccacttctccaagggacggggatgtgcggaggttaactcaagccgctaattgtccgcaacaaaacaaaacaaaggcatttcgggccagagagaaagctcgagaaagcgaccgagacatgtacctgagtgagacagatgggagaatacatcatgacttcgccttaaaacgcactttccgggagatgcccaagaaaatcttcgagaagcaagaatttcatctattcattttacagtcatctgagccccgcgatgcgatcaatcaggacggggctctgcgctggatcaccgcaacttcacaacaaacccagtcctccttaaatagccaaagattcaagttcactcggcgtgctagatttccaggggtgaaatccaatctacacttttaaccctcttgcagtccgagcgcgctggccgtgcttgccgaggccgccgccgccgccggtgttggctgcttttcgcctgggtttggggatttgttttctattttgcagttgttgttgttgttggggtgtagggggtgcgcgaaggttcggtgtgggttggattggggtggtggttggtggtaaaatgctttttcaaaaaaggcggggaggggggcgcgggagggcgcaggagggcgagcgggcgggcgggagggagagcggggagaatgtgtcaccgcgctgggaaagttcaaggttacagccccaagcactgcggcaggatcccggagtggtgatcgcaggcgaaactttgccgcgagccgaccatgtgtgtgcgcgaggggcagcgtgagcgagtgcgcgcgggtggcggggcgcgcgcgggagagggccggggtgggggcggggtgggatgggggagaagggagaggccggggtgagggagggggcgcgagcgctgatctctggggcggaagaggctcgcggcgcgtggtccccggcagcagcagccgccgccgcccgcgccgggtcttcggcgcccggccgcccgcccgcccgcctcgccccgcgtctgacccggccgagcgtggaggctgctgttgccgccgctgcccagagcccaggggtatcaaaacgatctcctgaaaaattccaaacgataaatcccgctctcccgctcggctccaaactcctctcttttctgctctaggctcttttttttccctccctctcttgctttctttcgttgcaaaacttggaagttgaaaaattcaccggttccaccctctggaccccgctcgagctctctccaaatcagacttaaggattgttttattatttaattacacaatcatcgctttactcctcctcctgcaaacgcgcattccttttgcaccagcctctccacaccccccgcccccccaccttcctcctcctcctccttctccttctctccccccacctctccctcatttgttaaaggtatcctaccggtgctacagaaccatgactttttttttttttccaaaatagctcttctttccgctgccctccccacaccagcacacacatacacacccccgaaaacccgccctggaagaggtatttcggtgctcgctgcggactcttttaagccgcgggaacatccgagtgggagaagcaccgaaaccgtctgagcccgagaaaggaacgagtggaaaattccctcacacccaggccgcccccaggccggggctggggcgcggacactcgcacccggggcgggctcagtccgcggagcctgcggctgccgggaaaagggggaggccgagcaggcggggacctgagcgaacttgggctcaagtagttggggcgcgccggcgtggaccaggggggtgcggcgcccagcccccgacggccccgcccggagcccgggttcgcggatagggagggggtgcgggttcgtcccgggtctgcccaccaggggcccgcacccgaggcagtcgcggcgcgcggcgcttcgccgcggtttgccgccctccccgggggtgccccgtgcacgtggcctcgctctgagcgggaggaccgggccgagccgccgccgccgcctcttgctccctccacctcctccccgcgcccggcttcgctctcctcctcctcctcctgcagccccgctggctggctcccaatccccaccccccggggcccggggcgccggcggaaagcgtctccctacccgcccgggtgcaggcggggcggggccgcggcgcgcccggggctgcggggcgggccggcgggcgcgcgcgcgccgctgcagccctccagaggctgcgggccctgagccgctcggcgcccgcgccggctccccaccgcggcgctgccccgcccccaccccgtcgcccgtgcaggctccgagtgaatgaacttgattccagggattttgaagaaggcggttcgccttgcaccctttctgcaccccccgcccacatacacacaccgccccccaaatccagttttctgcttggggtggatggggacgagggggaagcaaaggcctcccagacaatggagggaggaaaagtgagcgcctggggctccgagtctacctagctgggggatccggggggcgctggggctaccgggtcctcgcgggcccatccccagggcggggccgccccgcttccacgggtactgctggggcgtttcgaggctcgcccccgattccccggtcctctttccaccgcttcccagctcgtgatctgtcccctcaactttagcccctctcactccctctggtttctgtccaccgtcccctcttccctcccccagcggacctggaggaaccagtgactttttccttcaccaagtgggagttatccacatcaagcatttcacaacgacacatcaagaaaagtaggcaggttcaagtcaaccatgaaatggtcactttttaaccccgtcctgtcctcattagggaaatgctcaaacacagtccgttttcaaagagcgctcttaatgaggcgagcttgccaagtttaccagctgcagcccccgtaaacccagagcccaaagaagaaaggcgctggggggtggggagttcgggaggccggggacgggggctgctgggactaggaagacaggtaaagtcggggagatcgcgcggacccctgcgagttaaccctttcggccacacgccctgggagcggcctccctgcggtccccgcccctgccccggcaaatcctggagtcagcgttctgacaacgttaatttcctttgtgcgggtcatttcttctttttgaaaagctgggataaagttggcagtctttatggatgaaagaaatgaggtgacagggttaatccaagtaaatactcatttctctcagaaattttaggcaacctcatcttagattaaacacacacagacacacacacacagagaaaccaccagcacgaaagcatcactttgtattgcacattacactgcatcccctttctcaccctcaccagattctgaggggagggggtggggaagctctactgataataccagctttaactactgcagtttccctttgaacaaatattcaatttaactggagttaatttaccataaaagacattccccttggcaggaatgcactaatatccttgaacacacctctttgaatgcctggactctcatagaagccattatttcggggtctctttaaaaatcgagcgcccatctctccttctctccctccctcccttcttccctccctcctcaccacaccacccccagtgaaatcctggcacccagagagcactcctttcagcctgagagcccagaaccagccgttgtcccctggcaaaaagaggcccagggctgagccctgggcaagtgtctcccgacatcgctacccctcctccctttattagtttccctttcccaacagaaaccatttccttctgccaccaaaactaggttgcatccaaaagtttttcacaagcttaaaaaagaaaaacgaaaaattgacaagtattacacagaagagcccacaaaagcttcagcaacaccaagggcgaagaagcagcgtcagatccaggtaagaccccagagaagtgaagacgtctggggcctcccaggcccatcacttaggggttcaaatctctttcaattgccccacgtttgagggtgcttatggctggttgcactttgatgaccatagaggatgcttgatagtttttggttttgatttgtttcccagaaaaaggaaaatgagataggagtatggtgaggcgaggaaaaccaaaaaggaatgaagagtgagcaacagagacttcctgaaaaagaaggtttatgggggtgctcagtttctatggctttgactgtcttctcaggccttgcagccatgtggagaatggctgacaccccccaaaacacttcttcttgtccagccaatgccaaggtcattgcaggccttccctggaagaactctagggagttgtttggaaagagggactggtggatttcggtgcatgggatgcctggcttctcttaacacaacacttgtccaccacctttggtttgaaaatctcaatcttttaaatcccaggtagaaggaggaactgagaaagtgcctgcattgtattcactttccattttttctagcacgtctgtgtcgtggtattaagagtggaaatatctctgaaaagcttctgatagtatcaaaatgggccaaacacttcttaaactttggtacttaccaatcctaaactcttcatctctccctcccacactgagagggttaaaagcactggtgtgacaggccactttcattcaccccaaaacctggctgaggaggcagaaagaagtgaatgattctctcagcaacaggaaactctgttatttcagtattcttaaagatctcctccctagatctccttgctgccttataagggaaaaaaaaaagtttcctttctaactaacagaaagtttattgatttctaaatagaatgccagtgcttcagctcactggatttttcaaaacccagttgtatatttgaaataagcaacgctaccacatttgagcctttcactacggatctccagagaggagcttgacatctcaagtatctaatattgtttttcttttaaccttttccttcctaaagaaattgcagcgacaggttgcaaatcctgggcagtttcatgaaagatttcttggaacttaacaaagctgtcatttccaatacactcgatgcctttttttttttttttttttttttttggctcttgcatgtggtttgcaagaaggttcaactattctacacaccctggctgcatcaccaatatcaatatttaaaaactaaatgcaaaagagacagatgacctcctgaccccagaaagcaggcctgcaaaactgcaagtatctactgcaccatgccctgggatctttcctttttccaaatgaaccacaaaaatcatacatgtgtagtctggaaaacacaaatttatatccacaaggaggaacaccaaaaatccactcataaatgcatatataaacaatcaagaagtattgaaagtgcctgtacttgatgagaattgcaaaatcaattttaccagctcaggtaatcaaattacccagctcttaaactactactgagtactactactactgtctactactcttaaacaaaaaacaaaatcatacccagcccttaacgtactactgtcaaattagggtagtaattttttccccaccagagaattcacaactggttagtttccccacccccattgctagccctttgcactgaaatgaataaataaccttggacctttttctcctcctctgggagctatttggtgtcccctgaggacaaaagtaaatgagaaaaatgacgctgttaataatgtcactgccgaaatgcctctactccactgtttaaaaaaaaaaaaaaagcatcccactaagtgtgtctacatttctagcatatttacaagttataatacagttctgatctcaacaccaactgagccagattcctccactaaggttatccggttttcacttctcaacagagatgaggccagtgcatcaacagagattcccaacactgtaagacacttgcttcacagattacaaagtcagcagttgccctgtaacttttgcatgatgtattttaaactttgaaaatagaggtaatagttgcctcacttatccacaatgttacaaaggttccatatactctctcacacagtgtctcttgtctgctgatattgagagagttgcagttattgctctttttcaaaatagctgacctataaagtaaaactatatgaccattttatttctacaggtaaactggcttctattacccatatacacatgccttgtaacataggaaaacagatgggtttttaagacaggtatagaaagctctgtccaaaatggctaagtagtctttacattctgtattaagtataaaaagtgcatggcagagcaactcaaactttctgcacccctttctctcatttcttctttgaaaactgcataacaatgcataacaacaaaatttcaaagtcaaagcaatgcataacaacagaattgtgcattttaattttcaaattaaaatttaagaaacaattttgtaattacaaagaaaaaacacaaacaattgggcctaaacaaaatatatgttcagtaaactttatctctgagtgtatctgaaattttaactacacaagccaataaatttcaaagcagtaatattatcaaattgtgtaatgtcaaaaactccaaaaacaaagttacagatgttcatgacatcacattcactcaaaattatgctgctgttcagtctgaccatattaaaattaaagggatgcctatgtctgctaaagaataaaaatttattttggacctcaaacaatgaaaccgtcaccatttcttgtatggaacactcagctaatcaatttcctattaaaatagctttcaacaatacttggctttaaaattcatcagggccagtaaaaacgttttcccagtgcacaagaatgcagtcccaaccaccgatgataattactgttctaataattttattgccaaagtactttttcctgtgttcctcatcacttaggcaggaatctgtagtatattgcgtcagtgagttggagtgcttgacctttgcccacatatgatttaatagggacttttcagcgctagagctttctccatctctcataccattaaatgaaaacatcaaacctcaaatgtaaaactggaaaccacaacgttttgtgtttcacaaactctttgcagtttttacttaggatgcttaaaggtcagtttctttgcctcacaatgcttttcttcatattgtaaatacactggaaagtcacactaattctgattttgattaaatcttgaactcctcagtcatatacacacatacaccctgcttatttacacgtgcattcttttctaaccacataagcatgcgtgtgttactttctggacttattccattttagggctgatttaaatgtctgttcaagtgtgggatcaaaagttaactttttcccgcctattggaagttaaagttacaaggatggtgctataagatccgttcaaagaaagtcagagttaatcttgtgtattttggcgccttttccctgccagctactgtacttggggggtgggggaaaaatacttagagatcttgtctgtcctgtctcaagttcagtggcagttcttccaacccgagcagaagatggccatgttcacagccctaataataattctgatcacgccacttcagcatcttgtgtcaaagtcgaaactggcttccccgcccccttcaatctgaaagctgccaagtcctcacacacttcacattcaaccacaacttaatggatgggatattgtgcattaaaatgtgtctcagacgtattggggaaaagaagacaaggagaacgagagatagagacacacataggaagaggaaaaaaatcggcagcaaaaatagcggggttggggggaaactattaacaggagtggaaagaaatccatcaaaatcggttttaaaaagttggtggggggtgcggaagaaaggctaacaataggatgccacaaattcagggatgaggggatgggggttaggactaaactttagaatgaatactgactttaaacattccaacacaccaatcagagttaaatagtacttctttcacttaaaaatgtatttttaaatgagaatatctgtgaattaaaatggagaaaagaatgcttcaagaggagagaatggcctacaaggtagaactaaagtatcatttgaacagtaatttttttccaccactgaggggagaggggcataaagcagagagttaaagcagaacaaaatgctagattctgcaccgtttggaccacaatgttactcactgattcccgtcataagagtgtgtcacatgtactaaagttgccaacgctaaataataatgcatatttgcaaattagttctgcaaatgcagcactatagcccacaacctgtaaaacaaaaatgacatttaggaaaggggtaaaacagccactttgcaatccacaaacaggaaaagaaaaactgtgccagggataggagggggtgcaaagaacgaataaaagaagcaaacaaaacccatcagttcaaagccacataccatcgcactgtattgcattaaataaaagagatcttgagtctgtaacagaaccctgggccgctgacttgacgtgtctcaggtacagatttgtggattttctcaggggttgttttggtgtcgctttttgtgtttagttaaaaaaaaaaaaaaaaaaaaaaaaaagcaatccgggagtagtcttatgtattttttaattgtaatttctgcactgccacagttcttggcccgagaagaaaaggcggtcaaagtcaagtctaaaagcaggcagcccttcagtctgtctggatttccagctttctttcctctcccttgcagaaggctgtttctcgtgcttgacttgaacgccgtccaggatggtgtgtgtgtgtgcgcccgcgtgtgcgtgtgtgcatgtatgtgtgtgtgtggtgggttttattgttgttttagcggggctgctccaggagtggggctgcgccggtcagatgcagccggcacggccccggggtcgcgcgatcgccccttccccgccctcggattggcctggcccgcggcggggctgccccggaaccgccacccagcagcgcacccttccgcgcccggcccgcgctcctcctgcagtcgcctccctggctttctctttctccggctcgcggcccgccccgccccaccctaccacggccggcctgggcgcgcgggaagcgcggctcttcgcttccgcctggcggcgggaaggaaaccgaaaggaggagccgggggcgggcgcgccgcgatgcatattcatcagggcgcccgggacccgggaggcgggagcgggcccgagtgggtgtggcggcctgcgccgcgcggcgcccctctcgagcgtgggtgggtgcgtgggtagcggtggggctctggtctttgtgcggccgcatggggccggagagcggcgagggcgtgaccgtctcgggggctgctgcccaggctccgcgcgcctttgtgcttcccgaccgtgtgtctgcggcgcgccgcgggcaaggggcccctcgccggccttctggagcaggaacccggccgaaaacgccgcggaaagactctaaaacaacaataatgataaagaataaggaattgctgttacttcctcacttcccgccacgttgctggcttcaacttcgccaggccacgtttgtttccgtgtaggaggactcccgaaatgttcctggctgcgcagcgttatcattaaagcaaaaggaccagaaagagcgcactttgacttatattgataggtagtcacgcgaatatcaaaaaaatagatcagtaatttagaagtgggtgaaacaaccaacaccaaagagataatacaaccccggagttcccagaagtaaacactctagaggagattggatagtgagttaatgttcataaagcaagcagttttgatcagcattttggaaacaaatatatgtagggggattttttttttcttagtttttgagtaatgcaattcttttcatgttaagtatctgtagttatgtcgggaaataatgtttaacagtttaaattgttatacaagtattaaaagtaaaaatataacactagccctaacatttacttagtagtaacccacatacatttagaaaagattttattacagagatcctgactaattatgtaattgcacaacagacgacgatagcttcaggtattctctaaaaaccctgttgaattatgtgattaccagtgagactagaatagctcccgatgaattattcttatctctctactaaatgtgagcacgtcagtattttaatctcaattatgtttaccctcaaagtcctagagaacttaaacgacattgttcgggttcatacctcctacaacacgcagtatttttttttaaaaaaaggcatggccttattaccaaaaaaaagttttttccccttgtatacacatcatacatacgtttggctgtgtgtgaataatatacatagctattttcagtgataataagtgcaaaactaaaagtgggattggcccaattagactttagaaaatgcccaactttaaaataatttgtctaactgcaagtttaacagttcccaatttctcctccaaaaaaattagcatatacagcttggagaaggggaatgaatgactgggagggaggggatacacacatgtagctatctccacactcagctataacttcccaaggaaaattaatttttaatgtttatcttgctccaagttattgtaaccacttagcgagtatagctataactcagtctccccactcagttcaagtgggtaacaaacagatctgttttcattctaggatttccaaatagtagtttcatggtcaagtaaatcacatttagtactaaggaaacaaatataaaatataaagattctatgcagctaaataaaaaatttatttagagtgagaggataacacttgaccaacagaagaatgatggatatagaaataagtaacatgtaagtaacacttgcatgggcagtgttatcaaatactaaaacttttatgtaagtgtgcaacagaaagtcttctctgttattatttgaagtccgcagcagaattaccaatccctcccaatgtcattacatgcaaaggagaaaggacattatagagagaatctagatttgtttaggaaatattttgagacacaaaataggaaaaggaatagggaaagaaagagaaaagtatttcctccattctcatgatgacttggaggaatccagagtttgtatcacctgtcaaagaatttctatctaagcattttatttagtcataaaatgtaccattgtgtgtcatgttcaggctttcatatattatctttttttatttggatgtctgtttcttttgacatgtgaagcttataatgatacttattcctatatccagcattcttctgttggtcaaatatgtacacatattatcattagatgatacctaaggtttataaaatagggagactgattttcaagcatgtcttagagaaattggtcttgctaatttttagttacctcaacgtgttgttgcttctaaattttttaattggtaaatagttatggtcttttaatctacaacgtcgcctgcttttctggtttttatattttgcaatgtaaataaatatgcaaaaaactgagaagtgttttgaaatagatgctcctttttaaatgaaaattatcttggttgaaagcctttctaagaatataattaaggtccagtatctttttatattaatcttttgttataaattataaataattattcattttttaaaaatagcactgtccaacactagttaagcattttgggcctctggcacatctaactgagtgattccagtgtttttaaatgacatttttttctgccttaagttgcaggcacaattcattccatagaacttaccagaagcttcacaaatacacttgcagttaagatttttctgcttcttcctaaagccaattaactggtaatgcagtttctgtatgttgtcttcaaattaagaattttaaaaatgtactagcaacatctgtgtatatttatctttgagaataatcactatataattatttctaaaaggcttgcattattacaatgctttatatcataattgaagtaattcctctaccccatctaaaccagtaattttgagtcattaccccaaaggtgtttattttgtcttacttttctatttctcaaaaatagagaaagtgtgttttaatttctatgatttttatattattaaagggtacacactggtttattagatttttatatttagtccattattataccagaatttgtgcaaatttaaagtatgtaataaagatagtggcatatttaggatgcaatactaaataaaacatataccatcttttaaaacaattggatattgaaaaataatatttttagaatttaaaaaatacataatgtatttttgaatatgaacatataaacacattcttttaaaacaattggataactatttttagaatttaaaatgcatattgtatttttaatataaatttggaaagattcatattttttattgcctcaggcaatagttttaaatatttcctaattatataaaaatagggaggcttaaattaggacatttataaagtgccaaatgttggcattttgtcagatttcattagatgagagctgtccctgcactacttttattcaggagaggagagtgcatgtctagtgtattgtcctgtaagaggaaaacccaggcataaataacaagtcatggtaataatttgtattattcattggttatagcactcttcagctgtaattcattatgcctcttctttagatattgatggtaaaaacaaatgcgataccattcctacaagacatagtcgcccatcataaagaattatatttgtggaaaagacttcaagaaattacaagataggcatctgcagtggagttgaaacaccacactgcccaggacaggcacactgggtcattttctaaccattgagagtatgggtacaaaaataaatatacacatgcagtgttccttctttcactaactacatgctgcacctgtgcacacatagatctgatgacatcttctaacataataaatctcaagtggtttgtggtgtcatcaaaaacctgagatggtggtatggctcatagccttaccaacccccggctatggccttgttaaatttcacaagctaaatagagacagactcagacttattccatgcaccaaccagaggttttcaagagcaggttaaagtggtttacagaaaaaaaaaaaaaaaaaagcctgcagttatgactcaatgtgtgaaaaatctgctctctgattcaacagtggtaaatccaggatgccttctagctttaaaaaataatgtttattgcaattgttatgaattctcagtttgaagtatcaacgatttcttagcctatttatgtttttaagacttataaaaatactatgagcaattaatcttcctatcttgcttactcacacttttgtgcaactttagaatttcaaccatcaaaatgcccttaaaaagaaaacaataaattggaatcaatttcagctataatgattaaattgagcataaaaaagcaagtgttttctgcaaaaaatttcaggatattttatgccatattaaggtttctgaaacaacagaattactaaggtattttttttttaaccattttcaaaaaacagaggcatctggcaatccagaaattagtgaggcaacaggatgcacgaaagcgctagacagtctactgatccttcagtatagtcctggcaaaagaccatcctgccttttgctcagtgaggccacattcaaaagaaagtcaatgttaattcccctatattcaaatcctgtggccaaatgtccccagtgtcacagattcctgttggcatatctagaacatgttgatatcatttcaagttgccttttacttaaagaagatcaataactatattttgtgtctatattccgtaagtaagaaatcgtaggtgcagcccagggagtagaggaggaattcattcctactacaaacacacattgcatgcttagcatgggtctggaccttgggctgggtgctgccatacaagtatagataggtttttgaggatctctgcattcgtgatatgaaggccttctattctgttgtgctaatattttcctccaaatttgtttagaaaagagtagccttcccatggggtgttttgaaaaccttcaaataaactctaaataacaacctgtggttttctgctcactttgcaagcagctgatgtgggcttgtagaatgaaaatagtgttcatatagaaaccaaagaaaaatgtaattagggatgataagtcagctgcccttctcatcccacttcatccactaaaacaaaacaaaccaaaacaaaaccctcctataatatattcaaaagtcaaacaaacaaagttgggaaaattttgataccactatggttcatgatgtgagaaatatttttgtaaacagaagaagagagaagggagcagtggtagatggaaaaattcaggcacatagaatttacctagcacccaaccagtactgctttcttttaccaactttttgttcgaggatgattgacaagcaaatatggaggtcagaatagaaatacaagttttaggaacatacctaaagtcactgcctctgcttttttctcttcatatctggcaccttctgaattgctccccgcctttttttcttttgtgataaggtcttactctgtcaccaaacctggagtgcagtggtgctatcagggctcactacatccttgacctccagacccaagggatcctcccacctcagcctcctgagtagctgccaccacaggtgtgcaccaccatgcctggctaattttttacatttttttgtagagatgggatgtaaccatgttgcctagtctggtctcaaactcctgggctcaagtggtcttcctgcctcagcctcccaaagtgctaggattattataggcgtgagccatggcatggggccctgagctgcccttaatatatatatatattttaaccattatctttaattttttttggttatatgaacaatagtagagatactttaaatgaacaattaacaagataaaaaagatatccacccacagtcccatcacctaaaaaatttgtttcatgtgcatatatctggtatctgcttatatgtaatatatatatatatgattgcatagttataatcttaaaatgaatataatttcatttcataatttttccacttaattttctatttgtattgttgatattagtgaatggtcacaaaattgtgaaattagtgacaaatggtcacagaattgtaaagttgttaaaattaaaagagacttttgagacctgtagataagagattaagaaacaaaactggaaccaacttttgttttttccctcctaaatttgtaatgttgatatttactgttaacatttaaaacttgatatattttgttgaaaaatctagatattttgctttttttgaaaaagtggaaggtgagactttttgggcaagtgttgcacataacacgaagagtttggagtggagtagcaactgccccctttagatggggcttggtctccacagtcccctttgccccttcttgtatcatattggcctgctttcctcacttagatttctgacttgctttctatacccctaagtgtacagttcttgatctagatcaaatgctcttcttatagatgaaaaacaaagttcagagaggtaaagtgacttacttatggctgctaagctagttagttgcagtgccagcatcctaaaggacacctcctgactctaaacaagcactctttgtattaatgtttttttcagagcatgtggggaaggggcttctgtgtgccagtatgagcagcctcaccataactactgtgaccacaagctcctttatagactgaaatgtcccaggatagccactcatcaccttttatgctccaggtcataattaacatttgatgtccacatgccaaacacctgacccccctgcaaatcctgggcccactcacagtgagtgactccttgtctttctctttttctttttttcttttttaagacggagtctcactctgtcacccaggctggagtgcagtggcgcaacctcggctcactgcaacctccacctcccaggttcaagcaattcttctgcctcagcctcccgagcagctgagactacaggtgcgtaccaccatgcctggccaatttttgtatttttagtagagatggagtttcaccatattgcccaggctggtctccaactcctgacctcatgatccacccgcctcagcctcccaaagtgctgggattataggcgtgagccaccacgcccagccatctttctcttattaaaaacccagtaacaggccgggcacagtggctcacgcctgtaatcccagcactttgggaggctgaggcaggcggatcacgaggtcaggagatcaagaccatcctggctaatacggtgaaaccccgtctctactaaaaatacaaaaaattagctgggcgtgggtggtggcacaggcctgtagtctcagctactcgggaagctgaggcaggagaatcacttgaaccctggaggcagaggttgaagtgagccaagatcgcgccactgcactccagcctgggccacagagagagactccgtctcaaaaaacaaaacagaaaacaaagaaacaaacaaacgaaaaccagtaacagaatgcaagtgagggaggatgatcactttatggggataacatcaaatatgctctaattgataaaggaagtacctaactaaaaagttaaatactttataatattcttatctgacatacctcacagaaatgtgatcatgtgctaagaccctagtagagaatcatcatcctaaaaaatataaagattccctctgtacagagaccatattttccgatcactaaatcagaacacatggtgcaaccaagcatttttttttaaatgattttaagattttgaaaagttttgaaaaacgttttttaaatagtttttaaccgtgttttaataaatccattctatgaaaataacaaatgtataccatctaagaatgatgatccatgtctgttgtaaaattcttagaaatttgcctagaaaatgggatttgatgacaatcactgccatttcatcatcataagcatcctgtgtagtttgtacttgcagtgctttgtttttttagacagaacaccactctctaggttttgctcccaaatggaggtagacctgaggacacacatagagtgccacagagtcaacacggtgaataattgagaagctcgtacattatgtacatgttgagtctacagttactctcttggtgggtgaagaagaggtccatattcaatcaggctccaggctcattcatagatgtgatcttaatggcccatattctaatgaaagcaccctgttaattgggcagcttgggctctctacttcatatataggagtccagcccctctgtactgagtttccccgaggtctagatatgcaagctttttcgggggcattttaagtgactacctaccagccggatcttctcttctgtgaccaatttaggccaatggcagcactttaattaagcaaggcctccctggggcaatggtttctcccaactttagattaaaagtaccatcaagacaagtgataataattactatttactgaggtctcactatgcttccgccctgtgctcagtactgtatttcatctaagctcttttaaagacgaggcactggaggtttggaaagactgagtaaccaattgaaggtcagagcattcatgatccaggtcattctaattcccaagcccgttgccatagcttaatagtttatgcagcaaggacatgaaactactagatgaatggggcccagtcacaggacttgccttggaggctttccactatgcctcaaagcatttttatcactcttcttttgaaattgccttttaaaccccaggcacattcttctaaatattatcaatagggtagatcttcctcctttgagtgtggatttaagttttggatatagccaggattcattcaataccctgtggggattaaagaacttatcaagctgggtaaaccagtttgggttgaaaacgaggcatgtcaatgtaagaaggttatattcattctccagtatgttctgaaagtaatggaatataggctttcaacttggacctggaggcattgactttttgggttcaaatcctgacttagccacgcaaaggctatgtgactctggacaaggcaggtaatgattcttaaccacgattcccttaccttcgaaaatcatgcctgcttcagtgtggttgtttggggatcaaaatttttcatttgtcaaaatatgtaggactgtttctgaaacatagtcctttctcaataaatattttctgaatctatatatcgattattacttttctttgtcctcgttcttcaaatagggtgagagatgataaacaagaatagatatggtctgcgacaatgaccagactccaagcctctctgagtgcccctaggcctgtgatagcatttatttgcaattatagtttaaaaaccaagaggaagccaggtggggtggctcacacctgtaatgccagcactttaggaagccgaagctggtggatcacttgaagtcaggagttagagaccagcctggccaacatggtgaaaccccgtctctactaaaaatacaaaaactaactgggcgtcgtggtgggcgcctgtaatcccagctattcgggaggctgaggcaggagaatcgcttgaacctgggaggcagaggttgcagtcagcagagatcgtgccactgcactccagcctgggcaacagagcgagactccgtcaaaaaaaaaaaaaaaaaaaacacacaagaagaatctccctagctccctgatgccaagagagatggatataaagtagactgtgttgtagtttgaagtttctggggggcagttttatctcaaggttgcttttaggtttttcctagaaaggtaagaaatttaacagcatcttgagcaactgcatgttcataaatatttatggagcacctcccctgtgccacgccctgtgctcaagttgagacgggagcagtgaggaccggagcagtgtccaaaaggtgctttggtgacaggcattgaatgatgctgcccaaatgctaagaattgagaacatatcagaacctaccaacacaaagagtgttagtcatctattgaagaagacgtcgtcacttatcaggcaacaagtgaatgcctgctgtgcccaggaaatacagtacgaacaaaaccagtgatattctagtgtggaggagagagacggatggggagtgggaggggaaaatgaggctatagctaacagaaacatagagcttgtgtgctgttgttctgaggccatgagcttgccagtctgttcaatgaggtcggaagggtggtctgataattctagaagtcttgcaggaaggcttttatcaaaagaaggaaatgagaagtgtgcaaagcctttctacagcctacagtcaatcaggggtattcaggggtatctagagaggagacaggatagagcagcctccaaggaacgctattgtagagctttggcagctgatctggaaccaccttggtctctccttggcagcaccctgcaagcctgaatgctttgagagatgtatgccctttcactctggcttatgctcactttcacaacacttatgaaatacattatctcatttgatcctcctaataatcctatattacaggtgtaatcttgtctcttgttttacagatgagaagatttgtgtgcatagagaataaataaatcacccaaggtcaatagcttgcaggtatcagaggcaggatttgaacctaggaaatgtggttctagagccttagctcttagccatgaattataagcagactttttcttcacccctctttcctcatcctcccactcaacagagtggcttgtacccacccttaaaatctcttctccttcccttagggctcattctaggccccacaactccctaatggggagacatatcatgggcacctttatagttcaactactccacactatagcctggtcaaaacttagtcactgaaaagagtcacttcagcagccttggcctaagtctttggatccctaaaaagtaagacctaagtgactgccttgtctctcttcctgtgctttcgaaaaagaaattgtcgtgtggtcataccattgaatattatataacaccgagaagaacaaccttctatataatgtgtatctaggaaagtatacatcacgagtgtatagctaaatgtattttccatgtcaccaccatacatcttaagagatgaaaaattattggcaatgcagaaaccgtctcccaatctcagcaaattactagccctaatattcttcccaaagacaaccgctgtactgatttctaacaatacaaacttgtactgcctggttttgaactttacataagaaaaagcatacaatatttactgttatgtctgaattatttcgttcagcctttcatgtgacattcctctctgcgattgcaggtaaccgtgttttgttttgttgtttccacattgcagtatggaattctattgtatgcatacagcacagtttatctattctgtacccaacaaaccttgggttgtttccagtttgaggccaatataaataatggagatatgaacattgtctacatgttttctattacacatatgtatgcattcttttggggtataagcctatgagtagaatttctcagttataaagtatgcctgtggtaaattttcgtagacaatgccaaatggatttccaaagtggatgtagtaatttatactcccaccagcagtatatcagttttaattgcttcacatcttcatcaagactatattccaacgtatagcaatatttccatgtggttttaatttgcatttttcaaatgactgatgaggctgagcaccttttcatctgcttattaaccttttggatatcctctttgaaatgtctgttcaaatatttttcccgtttttatttgcactcttctacctttttcttgttgatttgtaggagttctttgtatactctacacgtgagtcctttgccagtttatatctgttgcagatttctcttcctactttgaggcttacaattccactcttttaatgttgcaatattttttttaaaaaaacatgtttattcaggtgtaactgccatacaataaactgcacatgtttaaagcgtactaattgataagttttgacatccatatacacccatgaaaccattaccaccatcaagataggcaacatttctattacctctaaaaatgtttatatgcctcttggtgatccctctgtccttttctacctcccttacaaccactgatctactttctatcattatagcttaatttgcattttataacattttatgtaaatggaatcaaacagtatgtactctttttcatctggcttctttctttcagcataattattttgatattcatccatgttgttgtaacaatagttcatttctttttattactcattagtactccattgtattgtataacataatttatctgtcacctgttgatggacaattaggttttttccaatttttggctattacaaataaagctgctatgaacattcatgtacaagtctttgtatggacatgtactttcaattctgttgggtagatatctagcaatggaatgtctgggcatatggcagatatggcaggtgtctgtttaactttttaagaaaatgtcaacaccgttttccaaaagtggctgtatcacttcacaattccaccagcaatgtatgagagctcccattcctccacatcctcaccagcacttagtatgatcaagcccttttatttttagccattctagtaagtatgtagtgtatcccattatcaccgtagtatttgtctccttaataaataatagcgttgaacatctctttatgtgcttacttgccatttctatatcttctctggtaaaatatgtattcaaaactttttgcccatttaaaaaattgggttgtttgttttcttactgaatttttaagttttttgtatactgtgaatacaaagcctttattagatgtttgatttgcaatattttctgccacactgtggttttgcttttcagtcttctaacaggttctttagaagagcagaatttttaaagttcgatgaagtcaaaattgtggattgagcttttggcttcatatctaagacattttgcttaatccaacatcatgaaagattttttccctctgttttctttcagaaattttatagttttatgttttatattgagatctataatccattttcagttaaactttgtatttagtgcaaggtatgagtcaaaattcattacttttatatggatatttaattgttccaacaccatctattgaaaagacttttttcccccactgaatcgagttcaaacctttgtccaaagtcagttttccacatacatgtgggtctatttctgtttttctattctgtttcattgatttatttgtctttatccatgtcaattccacactgtcttagttaccattgtgtcgttataagaagtcttgaaatcaggtagtgttagttctccagatttgtgccttcaatattatctttggatgaactcttctggtattttgtcttgtttttaacaagttttctccaagaaaccttgaatctgctcagaccatgttacaacatgaagctgcaattagcacctgtggattttaattcctttattcccttgggcctaaaagtcatttttattcaaagatatgtttttataaatgtatgagccctgaagggagtgggattgtggtggtatttaaccaaattatcatcagctattatggtaactgaccaccagctgagcacctgacatttttggaaaatgactctacagactgacctcatgggcctggggaaacccaggtggaaggtgggaaggaggagagccacctatttatggtaatgcttacaagtaaccaggcattgctgggtgttttgtatatagcaactcactttttctaagatgcttataatctcacttctagagatatgctctgaagctgcggtccataagccttttctgtaaaggactagatattttaagcaggaccagcttcatgggcatggacctgcgcagtggcccagagcctgtgcttagaaagctcctgtgcttggtttaatgctctgcagtcaccacatcgaaacactttatttatttatttatttatttattttgtgcttttttccctttttatctaagtaagaagcgctgctgaatttttcagttgaaactgggcattttgtagccataatgcccagattttaggttttgcaggtcatacactctccgtcacaactactcaactctgccaatgttatacacaaaggggccacggacaatatataaacaatgagcctggctgtgtttccataaaactttatatatggatactgaaatttgaatttcataaaacttttccatgtcatgggatattattcttctttgtttttgttcttccaaccatttcagaatgtaaaaaccattcgtagctctcaacccatataagagcagttaacaggttctatttggcttgtgggtgatagttttctggctgctaccctagggagactcctgcacatgtgcagaaggtaacatatacaagaagttctcagtagaatagtccataaatgctccagaggagaaacaagcaaaagttccctcaaccacagaatggataaatgcattgtattatttatatacaacacacggttgaaagaaagaagcaagtcataaaaggatacatgcagtatgattttatttatgtaaagttcaaaaacaggcatacaaaagtgctgaaatcaaaataaaaaagtaaaagcaaggaaatgatggtgagaaaaatcataataatggttacctctcaggagagggaggtgatggggtgcggacctggcaatgttatatttcttgacttggggtcattattgcattggtgtttactctatattctttgaattagacattttatgtgtatactcggaagtgcacatctcctcactttaaaatttcagttctcattttctaaccctgagttggcatttggagccccactggggtggcgggggacacatgcccaggccacacgtttccaacttcctaaagctcctttgatgtcattttgaagacctttggcatccatctggcctcgggctccacacttcccaagaagagtcttggcttttatacattcagctgtttttcttttcagtttacttttgtttcagacactgatgctgtctgccaaattccctcaaggtcaaatccatattattatgggttccattgtcttgaaacctttctgcttatgaattctatgttttgtaatttcaagatgtaattgtaaataattcaattacattagactgggcagtaaatgcatgtactggccactttccctttgtccctctgttcctcggtgttgattcttttcttaatatttttaccttctggctctctatgtgtagctgtatgttgccattaactcaggcagggctaaattgaaagaaaagaaaatacgtagccgggcgcagtggctcacgcctgtaatcccagcactttgggaggccgaggcaggcggatcacaaggtcagaagatcgagaccatcctgtctaacacggtgaaaccccatctctactaaaaatacaaaaaattagccgggcatggtggcgggcgcttgtagtctcaactactcgggaggctgaggcaggagaatggcgtgaacccgggaggcggaggttgcagtgagcagagatcgcgccactgcactccagcctgggtgacagagcgagactctgtctcaaaaaaaaaaaagaaaagaaaagaaaagaaaatatgtatttgcggttggaaaggaaatgagcttaggagtagaacaactggagtttgaacctctttgcaatctatcagctgtgtgttcatagctagtgacctaacatctgagcttccctttattttatctacagaagtgaaggctaataatgaatactggagagagtcattgtgggaagtagatcagcaaagattaaaccagaaaacatgtgaaatatacctagctcatcacctcagctaccgtgtgacttgtggtagacacacagtaatacattagggttttctcttcttttcttcttttcttccttcctttcttccctccttccctcattcttgtttctttctctttcctttatgttattacttttttccttcatccatccatctatctatccatctccctctcctcctttctcctgcccctccttccccccttggatccccctcccttctttcctttctttctgaacctttgcgatagttttccgtctactgtcaccaatcacgttaacccagcaattgcctaaatagagaaaagatggtaggcaggttggggacaggaaaaatcaaagatggaaacattctgctcatgagcctgggaaaagaggacacaccatattctccactttacttggccatcccattttaaacttcttgtttcccctgaaactcacaggtttgttcaaatctagaaattgcagatctgtagcaagtatcctgtcagaaaatgtaaaaagcctagaagaactgaatcatgattttagggacaaaaattgctttcacgtaaatcacttggaaccctgtctgacctattgtaagcactcaaaaatgttggctattattactattattgttgttgctgtgattattattgttgttcaggacaacatcccagtatgtgcaacggaagttgtaagactattagctgcctcgtttgctaaacgcacacccaggttacaaagaatggcgattctttgataaaagaatggctgattctttgatcatttcccaatttcccccgttgtttcccccttaaacatttcattctgccttttccagaacaaacatcattataatcacttcttgttcacatctctgatatccccatggctcttgctgctctcactggtagtagcaacacctctaaatttactaccatctgcaaatatcattagctattgtttattccctctcccacactattaatgaagatgttaattaagaccagaactaacactgaccccagcagcaatccactagacatttatccaactggataaacttctgttagtcattacccactgctcatagacattaccactactccattctcttcatctgctaatttgtaagagactaggggagagaattaagggagcccaggattatttaaaaattaacaccctgatacttggggttttggaaagggatttggtaaaacatcagaaagacagtcgtcagtggcatgcaggagtaagtgagccagcctcccaaagtatttggtaattgcctggctaagcttatgggtttctaagaatttaggaatgcaccgtaaggctggagtatatagagttttcagtccagccacttcttcttacagatgaccagactgaggcccaaagaggtcaagtgagttgtccaaagttcacctttctagttagtgacagaacctgaattgtaaagtggggctctaactttcagtcctgtgctgtttgtaagaacttagaagcactcaatcttgcttctagaggttctgatctgcgcattagcattttcctaccacattttaacttaaggagcccagtgcctaccgacttcatctttgtgtcttcagcaaactgtctccaataataggagttcattgcatacttagtaaaagaatgggcgttcttcaccaagaggcactattctcttaaactataaattagagttctcaaccctagctaaacattagaatcgcccaggggaacttgtaaaaaagaataccgatgcccacaccacactcgtagcaattctaatttaattggattgaggagaagcccaggcactggtaactttttaaagctccccagatgattctaatgtgcagtggggttgggagccaactcagaggataaaatgtttttccaaagactcctaaactgagaagtttcttgttctatagaaggggttcatacagaatggctgtaacttagcaagtagaagcaaacttttctctcgaacaggaaactggctgctcttcaaaccttttcgttgtgcagaatgtgaattacattgccagctcagaatgatgtggtttggaatctattaatctggtggtggtatttatgcctggcattttttccaaacttaacttttgctctgtaggcagttgtgccaacttaagagtagggctacctctcaggtggtccggaaatgagttactgacttagtataaaaactggcctactagaagtaaagtcatggaaagaacagaggactgaccagtgtcggggttgggtgggagcgggtgggcggtggcggtagtggttcttatttatacgttaatactcgttgtacccattgcagtaacaaatacctgtctgccattggtatgccaatgaagccttagtagatgaggaatgtaggtcaaagacaagataaagaaacacagtctccagcttcttcctggacaagagcccaagaagaatgcaagacagggctttggaaggcttcagaatctgctagtcttctggcatcacacgttgtggtcttttccatttgagggaaacatccctaaatgactaagtgctcaccagcactcacagctgtcagaactggggaatttagagtacccgtgcttggttgtgcaggttgtggactgcccatgggtacctggtgcgtgggagttgaaatctgcaatgagaaggggtgcttccaggaaggatggacagctctctttgtagtttacagaaaggagccacatggaaactggaatgcccaaggagggagaaagatgaaacaggtttccacatctatgtcataagtagcagaggccctcaatgaaaacaggtaggtagtaagacaagcaaagagaaggatcagaagtgctgggaagggactgtgagggactggccacctccccagcacagactccagtgtcagtgccgctcactggttgccaaggctccgataaaacaggaaaataggacaggaagccagtgaaatgtggaaatggggtatctgtagaatagacaataagacccatggaaaaaggaagtctgaggtgggaacattttttatgtgttcactctcccaccaattgaagctgggggctcatccatggctcacgggcttgccagttgctgttacaacctggttctgcttctggggaagacaaagaaagagagggaatctcagcaacagtcgggctaggacaggcatctccatcagtgagtgcttccagatgcactgatgtctcagcccaaaatcccactcaagaaacattgcttagctagagagtgactcctcgggaggaaaaaaaaaaaaaaaaatcagtcattttgacaaggtcaaaataccaagaaaacagcattcccaattgggaagttgtgggtcaggacaatagttcattggaacatactcttttctgtttctcccttcttaagctttttggccatggggcaatttttaatatgtccccgagagcaaaagctctctgggcctgtgaaaacgtatacatggctggattatgggtaagggtctctctcattaaccatttgaaaataaagaacctagataagggggtagaataatggagccaaataatcccacccaagaacaaattatttcaggcagcatttggcttagaaagagtagactactatagggtctgcagtgtttcattactgggactcaaggagcaacaaagtttcccttaggaactgaaaactggggcaagtggcatgaattccctttgcttacacctttggaaagatcaggggaaaagccagtgaaatgagaaggaaggaaggaaggaaggaagacgggaggcagggaggagggaagggaaggaaagaaggaagaaaggaaagaagagaaaaaagaaatagggaggaagaaagaaaaagagggaaggaaggctcgtttattgaacccaggctgcatgccagacattacttttggctttttcatatatgcaatgccacttagttctaaagagaaccccaactgtgaggaaggtgtagcgggctacacatagtcacctagctaataagtggccaattatattcaaaccatgtgtgtctgattttaaaactcctcccttcctctcttgacaagttgtcactaccaactaaatatgcatccatatacacatgtgtatatgcatgtgcatatgtgtgttttataacatcgatgcttcttcatactgcccttatcaccaagcaaccaaacaatgagggtacatttcctatttctgtttttcatactcttctcagactaaatgagttttctcccttcagagttgccccttatgttgttttcatatgtttttgtctgtatattattaaagaaaggagggaaagaaaagggggtgaggccaacggaaataatttgtcctgtttctgttgcctagtgagcatggccgggggggtaggggagtgggtggcgaggggatgccaccattttgccaaccctgtaccacctgactgtgggaattctcagatctgctttagataaacagtttagtcctgtttttcccacaatcttctgacagttgaaatttcccctgttactgtaagtcaaccatccttggagaagtttcgtttcaagtaaccatgctatacttctcttgaaggggaattgaagacctctaccccggtgccagagaaccccctactttctcatttttctctaagaggaggtggaaatgggctggggcgggggagagtgcttatgactgaggctgcagctgccctccctattggatactcagcctcacccttgcagcccagtagagagacgtggccaggttttccctgtagcagacacagatgcttcagaaggagttgctattacaaagggtttattaaaaaaaagtgtgaaagggatgtggctgttggcagggatgctggttccatgctacagcctctgctggctgcagtctggattcttgcctttcctcccttcccactttacaaaggtttaggttcactttataaagaaaagcaatccccaggcaaaagtgtgtacagtattttattaaagtttggtggagaagggaaaaggaagaaaaaggctggattgggagacagggaggagggggctggccacaagagagagggagtgagagaaagagggcaggcatgcatgagagtcccaagcagtgccaagaagcagagaaagggctgcttggggacaagggggggtcggggggggaagtgtgccagaaaccttatagaaagagagcaaagaactgaacatgaagaatggttaaaaactgaagtgcaaatggacttcagcatcttcctggcagagagtgctgcaaacaaaatacaaaataggccaccgtgacaactggaagaaacagaagttttgaggaggcagttaggagatgctacagaaatggcctagcaaataagtaaataaatgccagagtatgctaatatgctgaggacctttaaagagagggagagagagagagaaagagagagagagagagagagagagagaaacactaaggtgcctgagacagagcgacatcaagtgaaagcaaaaacaacagagacagacacacacatacatagccagaccccaagagaggcacacacagagagagtcacacagagagaaagacagaaagggccgagagaggggggtgatgggggtgcgagagtggggtgagagagaaagtctccagccaaatgcgggagacttggcaggtcgacaggagcagccgggccaggcagtaactgcacttgctgtgtctagtctattgttgtctcagaaggggggggtagagggagttgtttgtttgttttgttgtttggcctctttgtctcttttgttccaagcagttagtttgcttctttcccagacactgggctgatggaagagctttatggattttttcttaaagggacagaataagctagttcaccagtattatcgatttctcagtcctaaccagttctacctaaatgactgggtttttttaatagaaggatcctattaataattgagagtcagtgtttatactgttttgtgtgtgattaacaagaataaacgggtcgatttcatcctccccactgaacctcctcctacagggttgccaagactgcagggtaaagaaaggaaagacaaaaaggagaaaaaaaatccgtaactacaaacaaaagcaaatgaagggcatacatactaaaagaactaccaacatacattgctactttcaaaaaagaacaacatagccatcaagattagaaatacaatcttgagggtttaaataaccagcagaagaggggctttgaaggaagaggggtggttggggcattcttcccacacccctacagcctaggcactgcagcttccaccttcggcccttcccagcatccatcctagagaataaaaagcccagctccaggggttctgggagtccgtcttgggccactctcctgagctcggcctccctgggggaactggccattaacacactttcgcggcggaagtgagcgtgttgaagggtacagtcactaaattgaaaggagagctgctttttattcatttgagtagaggtaagagaaaggggcatctccaaagcctttaactttttgttcccacggagactcctagcttcctcctgtcccaataatttaaataggttctagtgcaaaggaggtagcttctgtgggaaatgaaattttaaaacatccccaaattcatctaccctcgattttcaattcctctctaaccttgccctagaacacagccagctctttttcttaatcccatctttctccattcttgccttaaaatctcccagtgaaatctagggtaccggagcttaaaaataaataaatgcaatcaaagggtctgaggctatgcgaaaggtgcagaggagtggagtagggaaagggaagcaggggttcctttgtgaacgggatcctttatcttcgaagcaaacgcaaatcagagccgtgcttctgcgctccgaagtgcggctgccacatttggagagagcgggcagcggctagctctgcgggtttgggggtgcttctcctctgccccatctccgtggagtttggtacttaaaagcccagtgtgtcaaccgctcagacttgaaggtggttaggtaaagagttaagaagcgaggcggcttacacccataactttatcctccccctcacctgtatttttctcccctcacacccctccctcttcaaacggcctttcaaagatgacttaggggttccacgaatgtcgctgcacggttttgcttctcctcgggtgccatttcgaggagcctagaaacttcctgcctttctggttgaccctccgcagggctttctctgacaccgccatggtggcaacatgggccaagtggtacagggaccagcctagcgggtgggaggcctcgcctgtgggctgaggaggcacgaccctgatccccggcgcgcacagtagaagcgggacctgtgctaagccacgggaaggggggcgcgccgcgggcgcggggggcgcgtggggcacgtgttcaccccagcactggaaagagacttgcggtgggcgccggagtcaagtctcctgatgttcatgcggaggggagaggatttgtagccatctttgctctgggtggagatttcatatccgcagtcacacgaggtaaccgacaccccccccccgtaacctgagctaaaggtaaaggtgatcctgaaaccgcttgcccctgggaacgtcgctccggacgggcgtcatctgccacgtgtgataggagccgtctggccaagtggaaaaatctaggctaagcgcagagcacaaccctggcagggtcaagtccgatttcaagcccaacccgatgggattcagaaaagcccgcccagcgtccccaggcccagcagtccacgccacaccgtcggcgacggatttcgtttctattccccgcacgcgccccagcaacgcagaaggagatccagtttcgccacaacgttcccgttggcttgctggtttgaaagttgaagccccggggtagtaaatttggctacaaaatctcaaatctcgttaatcctagacaaaataaaaacataataggccacaaattaactagcttggggcggtttctgtgatggtcacctggcggtgcgcaaggagttatagaaccttgagggggggatcttttctatctctaattacctgtatgtgtaaagaactcaagaagacgtcagaacagggtctcctatcaactgctacctattgctgtctcgcaaacatccccctaaacccgctgcatcgacagcttcgggtgagggtggggtaagaggcacttactgtgaggccgagctcccgcacgaattagcctcacaacaggacctaggtctcctagggagacgaaactaggccagcgaaatcgcggccagggagcccctggcccccactcgggagacaacccgcccggcgcgaagggtgcgtctcctgagctccacgccgggagctggaaggcaggcagacgcgcgaggcttgggaagggtgggatcttaaaaaaaaaaaaaaaatcttaaaaaagagaaataaatttgaacaaaactaaactacaagcccgcagttccccgccgaaagcgaggtgggggaggagggggcgggaacggtcgaggcactgagagtgggggatgagaaacgaactccgtcccctgcacagtcagtgccttcgggggctccaccaccgcgcgctcccaccctcaaggtttggactcctaggggagggagaggacgggagggagaggaggataggtggagggggaagagggactccttttctcctcctgccagcgccagctggggcaaacttgagctggcaaagcgcgagaaaacttttctttggaaagtttaggtagcgcagttagtggcggaggctcagggcaagctaacagtgctggggcgggtgtggagggagtgagctgggtgcgattgggagaggggagaagggagaagggaaggagtggccagctccctaggcggttgaagatccaagtctcttcggtcaggtccgcccaaggtcccagaggcactggggggtcgggtgactgtgcggagtgtaaaagacatttccttaggaaacagacaaggcagggccaggagttccgcggttttttttccgtgcagaaatcactacccggcgacggctcagggcggtagagggcaagtcttatctgccaaggcgggattagattctctcgccgagggtcccagtatcccgccgcccagcaagggccgagcgcgcgcgcgcgccagggagctttggagcgacgcgcgtagtttcgcgtcgcacgcggtgtctggtctccgcgcaccacgtgcgctcgcggtccttggcggggacgttggtgctagcgatccgacagagcacccaggactaggtttttgtgatgccctaacctgggcatttatgctgggggcggaacgaagtcgcccaacccaagttctccctgcaccctgggaaggaaatgtggtgcgccctctggggcgtgaggccgccgcggcccattctacacacctactggcattccgcttttccttactgtgcgccaggggaaggcataattcaattatatcatacaactgcagcgcacccttttccttttttgctttgaggggaattttccaattcccaaataaatacctatggctctaaagccgagttgggttctgtagtaactaccgggggtgaaaaaaaaaaaagaccccaaattggctgtgagtttacagcctgaagcagcttatttaggctcgctgagcgccgttccaaacggcagggctcacgctatttcgggagaagttggagggtggagagaaaacaaggttatttaaagtgactcccagaacgcagctttcgttcctagactctttaggtgtcagtgcttcggctccagtttagcacggcacaggcggcccagcctttgatatttaagccaggccagcgcccgggtgaaactacctgttgggggattctgccgcctggaacccttcttcttctgcgcaatactggcagcagtgggatggctctgggggtgccacgcgaagagagagggcggaagagccgggagcagcggacagtcagctgcatgtggcagtgcctagcgagctgctcccgcgcctctgctcgctctttgaaaactggaaacagccccctgtgctctgtgctgggcccctggctgcggagatgggcccaaactcggcacgattctctaagttcggaaaccacgaagcttgcgccttcatgcgtgtctaacattaaaaacaaaaaaacctcctggcggcttcctgggctcccgcccccaccttgcgctccaacacccggcacttttccctgtaccgaaattcactttactacttcttgaaattcggaaaactccaccgacgcttggactcgctgcaacccaggggctgcctaaagctctcgcacgagttgcttgagggaaatcactctctgctcttgcgagcaaacagatctctgtatttttaaacaatctaactgaatgggggagcgaagctagcgaggacaatttgagcagtctttgtagcctgttgggagaatttttggaagctagcggggtgggggtttggtctcgcatgcgaacctgtgggaaggacagttcaggctgggccctggggctggaagtctcatttgaggagcacacggtcccgagaatggcacgtatttaacaaccttctttagggcaaactctgcaacggagcccgcccgacattaaatttagggggtgtggaagcgtagactgggttcaaccgggaaattttccccgagacgccaaaggcattccgcgttatgtttcccatgcgggtttctgctttttgatagcgaaccccactccgttttgggagcagcgaaattttggagagccccaaagcagggctcgtttggggtccaaagggaagaaaagacttgatctgtggctggggaacagcggcactttatttcctggggcatgcacttacattccctacggccacaaagcacccagctgaaaacgaaatgtgggcaaatattaggtaactacggagaaggagggaagttagcctcatcttgtttaggatactcgctttaacagcgaggactgatgggctatgcggaaaaaagaatttattagtgacaatttcttgcatagggatgagagttgagacttcgagctaaaagacggctcagaacgcttcccgcgcggcagtcccccgcctcccttaaaaaaagtcatcctgtcaatattggctcttaagtcacacccccattaccggtccacagtggcatttcccttccccgtgtgcccctttctatacccactcatctgggctttggattgcccatgatctctccctgcctggaaaaactcgtgcaaacttgcccttcaccaggcacgcacgcacgggtgggctttccccaggagggtcgtttggcggccccggggaccctcctgggcctgggaaacccggagtattttccagcgctcagcctcggtgcctctgtattatttcggttcagtcccaggggccccgacccaaggataataaacaatgccgcttattagagatacaaacgggcacagaaaagaaccacacggaaaagcaaagcacagaggcattttaacaagtggttaggcattcagggcagcctgcgaaagtgacgcaaaattaaaaacgaagggcgtttctctaagaaaaaaacagactttcacagaatgcagattttgttaaaacatgatggttggaactacgtttagtttggttttgcctctggagatcagtcggagttgttgctacctgcccttgcctcgctgcaaatcgccacccccgctgcccccaattcctatagggcgaaagacctgggtggggtggggggggaagttgggggtcttctagctgttggcatgctctgataccgttattccagatctctcaagaattgaaaacacgacctcctctttagggagggacaacaggggctttagggggagatgtataatatcaggcgctgccagatgattcagagatacaaaaaaaattcctctttctttttaaaatgtaaatgcagataccttatgggcgctgatcgtgagagtgggggctagggattcctccctgggtgcgggtgtaaccaatttctggtctgccgatggccttgggaaagggcctcccatctgcttccaacaacccccttacaatgtcagaaaatcttcctgcctgcaaatattggcacaaagctgtttcgacaggcggtgctgctttaaataggaaggagaccgcggggcaaaagaaagtcgcgacctttctacccactagactacctgcctcctatcccccaaaggccaagctttggcaaaggagactcggagggaaatctcccgttctgagtggcgtaggaaatgaatcagctgtgtgttccaggaacaaatctttagttggttttcaggagttggagtgcataaaaaataggtatccccagactagctgctaagcagggagaggatcatgtttgggcatctgcacctcctatggtccagtctccccactttttttggttgttgttaagataaagtttatgctggaagaaacttcagaggtgctttagcccaattctcttgggcagtgggttccttctgactttgccgaaagtaatttgtccaaagggcagctctgctcctggatctgcctagggaggcctggtctcaacagcgccagccctgtgccccatacagaactctcatcctagggagctgggctagggctggctgtgtccgggccagggatgcctggaccttgaatcacaccccttctgcctaccaagggcatctcccctgtcaggaaatgatcgtggtgccaactgcactcaaggaacacctcaaaccttcttttctcacctcccatcctacgctgatggccctatactgttcacacattgtttcctgatttaatttctgtacttgctttagaacttattcagctatctccagccctttctgtctatcctagatgacaacttctcctagaaagagtttctgtctgatgaactcaaacttaagaagcctcccttgcaaagactgtgactgaattttagaaggtatctcaggcattttgggtggtgagcatgttgtcctgtccttctcaccatttttcaaatcaagtggcttgtgtctcattgctttacagataaagaaactgaggcacagattccttcctatgcaggcctttgaaaagcagctactatgtttacatagattccaagggacttgacttactaaaaggcatacatggatctgagagcagagtgtgccacagaccccgggtctcttgatttgaggtcccatttgcccacagttctgacggaagtatatagctaacaataaactactgttgagtgagcatcaactgtgcaccagaccacgtaccatgccagatatgttacataagtcatctttgcagcaacgctaaagagcatcattaaccccaataaaattttaaaaataaaatcataaaaggaacacatgcgtaaatccagatacttcaaataatagaaaacagcataaaatgaaagtaaaagtctcctaccctgctccgtctcctggaattacactgattttttcatttttttttggtgatgtatttgtatatataatagatgttatcattattttatgagtgtggagttgggaggctcaccaccaagataacaaaccatggctacctgtctccgggctcagcacttcccggtactctacattagctaagatgaacgtggaaataaagaagtgagcgaggccacaggtaaaaagaagagtcgggtcagaattgacatcaccgcttcttttgcactgttcctcctgcccctgcctggctcctgagaccacaggctccctcagtgtatgtaatctgatgatcttctatggtggctgcatttcttccaggccttggtgcaattggacaagcaagtgtttccatgctctgtcacccgggccctcagtgctgtttctacgctgtactaggtctggtcctgaggcaagcctctaagctttagatttcactgcttatctctcagcgttgttgagaggctccaataacagacagggaaaggactgtgtaaacttggaatctctctatgtaaacatacagctgcttttcaaaggcctgcataggaaggaccctgtagcctttccctctggaacagaggagtttcaggagtctttgtgaaagagtacgtttttgacatctgagggtttgcattgtgtccgtttgtgtctataggggcagggttaggagtatgtcttaaagtagaagaggatgctcatttattactgaatctttggaatcaggagactttggcaagggtcaagtggatttctttctgctggagggcacacagaggcaagctggtggggttacaaggaggcagttatcctgcttggggtgcaccatgggttggtgagaatggcagaggtatggtgaaggtgctgcagcctgtccctttgggtaggtagctactaccaaaggctgtccttagactgtaggggcagacagagggtggtgagggataggtccaggccgcgtgagcttcccagacatgttatttaatttgtgattgtttttgtgcgtggaaaggggagggatattagaggatagatgtgacagttcttctgggaagctggtcctgttctatagggttcttcattcaggaagaatagccaaaaacatcctgagttcagaggcctgcaagtgagaacaaatggtggaccactgctagggtgtccttggcagagcgggggagctcctggagaggggtctctgaactgctgcatccctgcaccctgagaatctgagcatgaggaggaagcagaaaatggctttaaggcgaatgaagggggctggggagtgggctggttccaatgagagaaactgaaaggagggaagtcagatttttcttgacggcccagtctggcttcattcttcaatacctgtcaggacaaaggctgctgcgccccctggtgtccgactggccgccgatgcctgcgagctgacgtggagacccgcaggcggtgagacccggggaccagctggaggagtccacgggtcagatgccttttcttccatttgctaagggagttgaagttgaaatagccgttgctttgtccgttctagagtccaaatagagactctagtggagagcgagaggggttttgtctttttttttttttttttttgcatgcaattgaggctgacaggacaatgcctgtttagaagtagcctggtgcagtggaaagtacgctcatctgaaagaaaagacctgcattttaggtggagagctgatctggggcaaatcacttaaaatgttccaacctccccttccttctctaaaaaccaaaggggttacagtaagatgtctgtaaggtgttgtctgaactctaatgttgattgggattgattaaatcactaatacaccgcaccctattttctcagagccttgcaaatttgacattattttttcaatctacaggcaggtgcaaatgttatgtttcagcatcatgagttccctaattgtgagcaaagattttagtgtctcctttccttttaaaaataaaaaaatagctcttttgagcacagaacctccctcaccaccaccttttgtggagcctcctgcaagaaagctgcagagtgaacagggcttcagtctctgctctgtttcttttaaaaataaagtactaaagtattgtgctggaaattctgctactaagtgttacatgtggtaggtgtgaatatatgcttcaatagttccaggcacaagaccaaaatcttccccagaattagcagagttttcagctataatctggctaacatttttctacaaataggtacaaagaccaatttgagagtacggtctctctaaggggctacatggttgggtttccattgaaatttagggccatcccttgtacagtcaggtgaatttttaagtgggatcagccctggggaataattatgtagtcgctgagggtttttctctcctaaaatctccaaatctagtttctgaggtgagcagtcagttatacctcatggcaattttttccttcagcattgcatttaaatggttatctctatgtaatgggtactctgtgtgtgtgtgtgtgtgtgtgtgtgtgtgtgtgtgtagaaatggattgtcccgtgaaggatcacttgaacagcaaccttagctttacagatgtgaagggagtgtgtagcccttgtcctgttgtgaacactgtcactattccttgtgcggcaggggaggagcaggtctctctaaatgagagaagcgaaccagaggaagaacagcagcacaaatgagatgacctatagcaaccgacccctgcttcagggatggggagatgctgtgtgtgtgtgagcatgtttgggttggagtaagcacagtgacttggaacactgcacccctccccaaagggaaaagctgtgttacaggctgaactgtgccactccaaaatcacccttgatacctcagaatgtgactgtatttggagatagggcctttaagggggtacttaagttattatgaagtgggccctaatccagtatgactggtggagtccctgtaagaagtgattaggacacagacatgtatagagggaagaccatatgaagacggagtaggtagccatctacaaagaaagaggcctcggaagaaaccaaccctgctgacaacttgatctcagacttgagcccctagaattgtgagaaaataaatttctgctgtttaagccacccaatctgcagtattttgtaatggcaagcgcagcaaaccaatacaacaagatgatactctgcaccagcccattatgtacagccatttggagatgcagacccagggttaccagattctctatttgaagaatcttttgctttttaaatattggcagcagggctggcttcctgggtgtgtgtcctttgcagtcacacgggatcccatacttagaagtgccccacgttggcttaaataccctgcttgcctggccggctgcagtggctcacgcctgtaatcccaacactctgggaggccgaggcaggtggatcacaaggtcaggagttcgagaccatcctgcctaacacggtgaaaccctgtctctactaaaaatacaaagaaattagccagtcgtggtggcgggtgcctgtagtcccagctactccggaggctgaggcaggagaatggcatgaacccgggaggcggagcttgcagtgagctgagatcacgccactgcactgcagcctgggtgacagagcgagactccgcctcaaacaaacaaacaaataaaaaaaaaaaaaaaaggccaatttgcaattcttaaactttcaacaacgggcttgcatttttgcattgcactggtccctcacaaactgtgtggccagtgctagctgacaactagtacacgttttaaataatgtgcatattaagattatggggtcccaaacaaaatatgcctgaggctggggcagcgtgagacactagtacgcactttttgtcactaactggattaaaacttcccattctctggtagtcactaggagggaacttatggatcccagaggttttcttgaagtgggaaaaagaaaggcacagatactccccaggatgttatttcccaagattccacatgagctagtgtggctcggaccaagattttcttttcccagggatggatactgaggatttcacaataagaatatcttgagaaaaggccccacacgaggaactagtgtttggggttgagggctaagtttagccctgcatgtggctgatgctggtgggctttgggaagctggagctgaatatgctacccagaatggtcagcaaggccctgaggggcagtgcagccccgtgtaaaaacagcaccgagacagagcaagaaacaacagtgagagcaggactgatttcgtctcctgttttttgcctggggtttacgagcaggactcctctcttgcactccaccagtttcaggattattaaggggtcctcagctggggtgagttaggagggctgagctggagagtaaaactggatggtctgagggtctgggtgatcctgagcacttaattatgaataatgatacacttcagttttatagtgcatgccataccagtggattctaatttggaagggaaacttttgctcttgctgaaaggaatgtcagtcaccggtgagtggtcatggggctgttatggggagatcctgtttttaaggatatacactgatttatagaagctcactgaaaatattatagcggaatgtttggtcaggaggtctgcttttctagttctatttctgctcagtactggctaactgaagagtgtaaattttaaaagaagtaatttcttatgcacactgtgcaaaatccctcaggggaatgagtgaaagactgtttgaaatgctctgaatttcttggaaaagagttgctgtataaattaatatagggccttctttttcattgcaggtctgcaggacacaccaaagaactcctccaagtcacacaagggagaaaattaacttcattggcttctatcaggaaagctattttttttttcctcttctttcctgcaagtttcccaaaccccatgactctgatttccaggtcagagactaaggttttatttttcttactctgtatactttatatgtggagagtccctgaaggaacactgtgatgggctgattactgtgagccagttgtgggccagacctggcctcaggtgctgcaaagggaattcagtcacccctgtgcagtgatctgtgagccccaagtcagatccaactttttcctgatagacagcaccctcctcctccctaccaagaaatagcagggttggaggtagtgacccaatattcaagaggtttgaaattctacatgagatatttctgagttaactcctaaatagcagtttccttaatcatgtggaaaataagaacacttactaaagagaccattggtttaagagaaatggaaacttatgtccacgtaaaaacctgtaaatgaatgttcacagcagccttttcataatagccaaaaagggaaagcaatccacacgtccatcaaccaatgaatggataaacttaacgtgggatatacgtgtaatggaatgctatttggtgaagaaagaaatgaaatattaatacatgcgttaacaaggatggaccttaaaatatcatgctaagtaagagaagcctgtcacaaaagaatatgtattgtaccattctacttatatgaaattcctagaataggcaattctatagggacagaaactagactagtgattggctagagcttggggagagtttggggagcctggaggatgacagcaaagtggtgcagagtttctttttaggttgattaaatgttgtaaaattaattgtagtgatggttgtgcaactttgtgattttgttaaaaaccattgcattttgccctttaaatggatgaattgcacaatgtgtgaattagacataagtttatttacataattaatatctatttattgatatataactcatatatcaataaatatatactatataaaataattttatatttatataaaatgtgaattatatataaatacataaataaaactgctaaaaactaaaaaatatatactttaaaaaaaggctgttcgtttctttcacattttctgagcacaatcactttgggataaatgtgtccaggcttaaaaagccagattttatgggctaactaaaatggaaatgtgaaaaactgtgtttttttccataggaggagagagtctgatttgcaggtacgtgcatacccacagcagtcatacttgtaattcttggaaactttgctgaaagttttttcctagcctgaaatcattaaaatatgttgaaacaatgacactgaggactgaggtggattcgttgtttttgtcttcccaatgttactttctccttctttaggtagtagcaccccagttttctctaaaagaaaccacacaccctatttccagttcatgtggtttggctattgctgaccttacaccctaggctctatgactcaggccccatcagtcagcgtattttatccagtggtctgttgcagccaactcatatcaactcatccaaatcaactggtaaatgttcagaaatttcatgtgccagttgttaaacactcaccattaaaatttaaagttcacaaccttataattaaattatgttaaaaatgaaggtaatgatacatcaaccttatcatcacttcctaatcatttgactgcattttactattatttatgctcttgagtttacttacatctgttggatctggtagtagaaacaccggataatggcgtgctgctatacatctcttcccaattccatgttcattgacttccctttgatagcttgaagttggccatggtagcagcgtttacactacagaactgggcaaatgctacaagatcagggtataccctttcttgccaaggagattgttaaactggcagctgtagtgggttgaatggtggcccctaaaaagatatgtccaaatcctagcctgtggaacttgtgaatgtgaccttatttgaaaaaaggcctttgcacgtgtgactaggttaaggatcttgagatgaaatcctcctggattatccatgtgggctctatatacaatcatgtgtacccttatgggataaaggcagaagcaatttgacacagacacaccaaagagacataaagataagatgaggaagcaatggccacacaggccgagattgcagtgatgtggccggaaaccaaggaatacctggaggcaccagaagctggatgagaaagaaacaaaatctcccccagagcttccagaggtagcatgaccctgctgacaccttgactttggactagtggcctccataaatgtgagataatcaatttcttttgttttaagccaccagtttttggaaatttgttatgggagccataagaaactattaataatacaccagctcaccactgcagcactagtgtatggttgagggatgggcatgtgatacaagctagggcaatgggaactcagcttctatggtaaaacaaacactctccttctccctggggttgctgggtggttccatctttgctactagatatacctatgaatgaaagcagcgcagaaagtagtaaagttagatttaaagaaagacatttaaagcagcacagaaagtagtaaagttagatttaaagaaaggcattgtttaagaaactggatctattctaccactagatttttaaatattacatattatatgagaaaattattttttttctttttaagccaaattcctaaccaatgtagacatgctaatttttggagaacttttgaaagtgctcatctgcacagagagcattttaaatacatatagttgttatcacttggtcagttactatttaaatgaggcataactaaaaaagacaatcaggaaaatatatagcaaacagtgaacaacttaagacctacctgaattcaatcatgttcatttgtgctacaaacacttatattaagcccaacccttatctaaagcattcgattcaggacagatatccatctatttaagagcttacaatttatttgccagtaagaaatttggtatagcccccatattgaggtcactagcagtatgaacttttcattatatagtttataattttccgaacagttctaaattcaagtaattttattatttttcctaaacagaatttggttaatgcacaattaaaatacttttaattctttatgagattacatttaactacatccacaaattataacaaaaagtattttggcaaattgaatgatttgggtggaaaaatattattatggtgattttctgtttttttcttttttttttttttgagatggagtctcactctgtcgcccaggctggagtgcagtggcgcgatctcggctcactgcaagctccgcctcccgggctcacaccattctcctgcctcagccttctgagcagctgggactacaggcgcccgccaatacgcccggctaattttttgtatttttagtagagacggggtttcaccttgttagccagaatggtctcgatctcctgacctcgtcatccgcccgcctgggcctcccaaagcctgggcctcaagcctgggattacaggcttgagccaccgcgcctggccttatggtgattttcagtgatgttgtacctttggttaattttgtaccttttgataatttttatttgttagtgtggaagagcacttttctgaaaggaacatgtcacagaaaaccccagggatagacatatttcattaattatttttaaaataaaaataaaatgatttacattcagcatttctatctttaatgatttttccaggtttaagagatttcaaattaattttgtcacccataatcctgtttgttttcctccactttcaaatacctttgttttttgatgagcacattttggatgaattcccagtcaactttttaatctaattaaattcagataagtttaactcagataacatttacagtcagctccttgagagttgattaactgggagctcatctttcagaattcttaaaaaaaaaaaaaaaaagacttttgaggattgctttttgctaaaagagcccattactaatgctgatgtcactggcatcagtaaactaacacccacttgtcttggtttaaaatgataataggctttcaaatgcaaatattcaaatatcatattattcttcagcacttctgtatttgctagtagcattactgatcaaaaagagaattgttctgaatattttcatgaacaagcaagcaaaccacatcacatcacatacatgcacacacatgcatgcatgcaaggcacataaatgatttcactaatgacatatagcatacattagtcaagcaattgtattaattcaagtctactctctttgtagtctagaacagtctccctctttgctacacaacagtagccactaaaatcttttggaagattaggatcattcaatatgaagttaaaagaaaacatgaaaaaatgaaagcttagttttaggatttcccatttttttcttagccctgtaatagcctaaaataaaacttgggaacaaatgaggtttaccaatgacaggagtaaacagactcaatgtaaatgtttataggaaaggcaaggaagctaattcctttccattaacaaaaaggagcttttaaatcttactcattcttgataatgctggctaatgagaagcccagcaagtttgctttttccttaaagctgaaacaaaactcaacacaaaaggtgaaatacaaggaaccaaagaaaatcattgatttgttctttgatgacaactttatgccagaggtactagggcctctctacattaattgttttcttcataaggaaaccactatagaaatttaggtgaatggagataattaagtagttctgtggctccaattctaacatgtctttttaaaaaagaaaaaatcaaataccccaacatttgcccaggaaccagaggagaaaaatagccttctaagagttaggccctcaagatatttcaaagctgcctggacaatgacttggaatgactacaatggtgaaccattctgccttggacccaaatctagatttatgacctaatatatctttcccaactctgcctgccatagttttatgaacatcaagaactgggtgtctgccactgtcaacaaatagagcttctccagagcatttccatccacagaaactcaagtatccccaaaggaacatagatcgcagtcttccaaggctgccttgggatgcctcaggatgcctctagctttcaccacaaactgtggggaaactgttttggcaggataattcttcaagaaaaggaagaatacctgttactgccctgtgttttcttggtttaagaacttttggtgaggccaggtcccgtggctcatatctataatcccacacttcaggaggccgaggcagggaggatctcgtaaggccaggaattcgagcccagcctgggcaacatagaaagacacatctctatgacaaatctgaaaattagccaggcatggttctgtgcacctgcagtccccgctacttgggaaggctgaggtgggaggattgcttgggcccaggtcgttgaggctgcagtgagctgggatcctgtcactgcactccagtctgcttgacagagtgaggctctgtttccaaaacacaaaaacaaacaaaaaaaaggactttgggtcagagtagcaagaattcactgagaagaagctaatgaagcttagcttaagggcttctcctttttaggggcctcttccaaactcttgtgcctaattttatatttgtaattttacattcattttattgagtccctttaatataagtatacactctacaaaatggggatctgctagagaaattgcatcaaactgagctagagaagttgcaccaaattttagctcaataaaattgtaaaaattaaaattaaacacaaactctttgtcttttacggacactccctcacccccactcctggcaagtcaccactgggactgagactactccgtttgaggccctggttgtcagttgtcctttcttaactgtggcagtggttcaaaaactggctacagttttcagctttgcccctccttggaagaacactctactgtgggctaattattacaatggcttatagaatctagagaccagacaagtttccaagtgtgctcctccttttggttaagcggtatcattgttccgatgtcaaccaagtttttgttttacagtaaagttgatggatttggactaggcttccatactttcctaagaggtgtttctgaagacccagccatagaaacatttatttttttctgattacgaaagcaatggcatgtatatgtgtgtacatatacatatatatgtgcatgtatatgtgtgtacatatacatatatatgtatatgtacacacataaacatctttaaactttataatatgtagcatagaaagtggaaatcccccgtaatcccacacagctgagaaaagcagttaaaattttttcaaggcatatattaacttttcacttattttacaaaaaaatgggattatactctcaactcaaaagcatgccgttttctatctagcaatatgtcttagacatctttccatgtcagttggtaaaaacttatcatctttttaatcttctattaaatagctccatgaaattgtattgtatggctgaaccatactctccttaaccaattgcctattaattcacctttgagttctttccagtttttcctgtaacaaatattcttgcaaacatcattttactcttaaacatctttgagcagttgtagagtctttctctacagtgaattcccaggagatgaattattattgggtcaaagggtatgagtatttcatttttaatagctattgccaaattgccctccaataattttatacccatttacactcacagccacagtgtaagaaattgtctgtttccccaccctcttagcaaccctaaaatcgtgcaatttgggaatgtctgaagtgagttaggagttaacaggttcagcctgtggagtttttttggctttgtgaagtttgttggctttgtgaaaagccaacgaagagatcaaaagtctctccctttccttgatgaactccctgctctgggtgagccaactgcccagacagacatctagttaatgcgagaggtgaaaattctaatgcttaatactagcgtctggctggatttattagaaacaatttgtctctgaatgtataagaaaatgtgttagtgagaaaatacctaataattattaaagaaatagaaatgggtccttactttttaatataacaacacatttcatcttacagcatcagaatgtttatatctgcacaattctttgatttcattcctacatttattggatcaaaatagttttaaaaatctagtcttcaaaggtgtgtgaaaagtgaccctgagccagccctttaaggaagagcaaggtttgccaatatccagtcttaaagagcacgttttgacagttactatggtttacctctccagaattaggataattgggcattagaataaaaagaaattttaggagttttctagtaaaaacattatcaaactctgctccacataaagcctcagggttgcttcagagagatgagagggtaatggaggaacaagacagcagggtgatttaagagttcttggtaatctaacagcaattccaccacatcaaccccattttgatctgtgccatatagtgggctgtgtattatgttttctgaggcacgttaatttctcattttcattgtctgtaaaataggcctaacaatagttccaatttcagagtagtgaagattaaattaaataacactacccatgtaaagtgcttagcccagtgtcctgcacatgccaaggacttagtaaatgttggctattttatctaagattttgctctgaaacagaattctgctgctaaaaaataaatttcgagaccaccgtttatgtttgtcatctctaaaataagatgattatttcagatgtaatggtttcacattttatttgtttcctgcttcccagtccaatggtcgttttcagaccctctcattcttggaccccagtccaattttgctgagaatgctaaaggctctgaggataatgtgtcttcccacaccccaggagactccactcaccaccaagtgtggccagaccatggctattctgtctgtgttcctgttgatttgtagaagaaagatggtagtacaaaagttttccctgccctgtgggataagatccctgcaggtagaccaggaggaataagcatgacagttgtaaaatcttagaaatattacttagcttccatcttttccataatgatgagttcatctgaaggagttcagaaatagattcttataccttctaagactggctggattttctattcttggccagacgtttgttctaggaagaattcatccaacaaacatatgctcttatcaattattttcttaggaaagcttgtcctagtataggggaagtttttaagtttttctaatgaatcacagacatgaggcaggagggagagagtatcaagcgtgttcctttctgactgatctaacgtgagaccaaaaactatggagtaagagcaaaacctcccaaactgtacatcttttctacccaggaactccttccatgccagtcactgctgatgcctgagagccagatgtgggcttagggatcagtttctctatgtcagggccattcagagtctgtagctgacttaggaacaagtagatgtaaaacctagaattaaaggctgaaaacagcatttaatgaaacccctccctccagacgctcctgatcaaagtctacccttgcactaagacaattgatctacagttgcattatataaaattttggcaacactctgtcctcattgctttcaacagaggctttaggcccctgaatctgggcatcgtcccagaattgagatccagttgcattacgcataccagaagacacaccaccacagccgaggcccgtgcaaccactttcttttaacctcgcgtctgtgaaaaattactttccaaaaaataagtgaaacccgatgtcttctccgggtggttatttttgcgcctatgaagtcaataaaactctccagatttattagacagtcctgctgctgaagacaagaccacttcctattccctagcggatatgtgtgtctttcctttctgtaaccttctgaccacagattttaattttattctttttttttttcttcttgagacagagtcttgctctgtcaaccaggctggagtgcagtgacatgatctcagctcactgcaacctccgccttccaggttcaaatgattctcctgctgcagcctcccgagtagttgggataacaggcacgtgccaccatacctggctagttttttgtatttttagtagagatgggtttcaccatgttggccaggctggtctcgaactcctgacctcttgatgtgcctgcctcggcctcccaaagtgttgggattacaggcatgagccaccgtgcctggatgaattttattctttttaaatttttttcccaaaaaatctgtcagaaccctctaggacaagtggcttggcctgcactgaaattccaatctcttgcactgaagagtgatgaaatgaacacatttcaggcacctccagcttttcttctttacctcctacttcagagggccctgttttctttgcatcagaatcaacaagagttttggctgtctctccttccaccactctaaacgctaaatgtaacacttatcaacaaattatactcctgtaagagtccactaaccctgagttgatgaccatgataatgacattggattcaattctactcagtgcaacagtatttactgggcccctaccctatgcaggtgctctacttgggtatgggaatgcaaaactatagaagataatgtgcattctttcaaggagtgtcaggtctactaggggagacaaacatgttaacaaggaaacattattaattgtgacagtttccatagtgaactcagagtcttgtgtgggtacaaagactaaatatggaaaggctaggaaaggcttttcagatgagatgtctcttgagctgtgtgtttcaagatgagtaggggttcatcaggtgatcctggggaagacatgccaagcagagggactagtaagtgcagagggatcagaggtgtgaaacagaagggcacatctgagatctaagaagttgtgaattgggaatgagggtcaaaaggttgtaagcaacctgtgttcctccatgaatatgggtgtgtattttcgttgatagggaaatgctgagggggtttaagccttagagcaattgatacatgagagggcaaagacttggaagcaacccaaatgcccatcaatgatagactggataaagaaaatgtggcacatatacaccatggaatactatgcagccataaaaaagaatgagttcatgtcctttgcagggacatggatgaagctggaaaccatcattctcagcagactaacacaggaacagaaaaccaaacaccgcacgttctcactcataagagggagttgaacaatgggaacacatggacacacggaggggaacatcacacaccggggcctgtcagggggtgaggggctaagggagggatagcattaggagaaatacctaatgtagatgacaggttgatgggtgcagcaaacctccatggcacgtgtatacctatgtaacaaacctgcacgttctgcacatgtatcccaggtaccaaacatggcacatgtacacttatgtacacctatgtacaccatggcacatgtaccaaacttgggacatgtatacctatgtacaaaacctgcacgttctgcacatgtatcttacgtgtaaagtaagtaaagtaagattaaaaaaaaaaaaaagagagacagagggaaacaagtggctggatgctgtcctgagagaaatgaagagagcttgaactaggccaatgttgagggaatgaagaggaagatttaagatgacagccaagaagcagacataaagaggtagtaatatggtaaagatttccaccccagaatgactttaagtagtttgtatttcattatttatgagtaaaaattactcctgaaatgcttttaaaagttgtttacttactaataaatatttttctgcacttacttccaaaaatgatgtgaggtaggaaaagaactctgtagctacggacagggccaccgtgtttcaccaggcagactggttacggtgcaactgcacacacaactccttggagtggtacagagtggcagccttggccatcttgaactgataagcatttctcgaccattatctttggttcagtcatctgaataacatttaaagagatttataccagtgctatcttgactaacttcagttttgattatcttcatgttaatatgccatattatctcaatttaactggcatcttctttggatgatgtcttctactccattccctcatattttggtgctttcagagagagaaggtgcttatgtctgcatagctcatttagtttgacaaaggaaaggagatgtagtatagcattttgggagtcagatgacccttattgttcccgtgaacttgtgcaaggtacctgagctcagttttcccaactatatagggacaatatcaatgcctacctcacaggtttggtgtaaaaattaaatgaaccaagaatagaaagtgattggcacatatagtaagtgacaggtttttggtactgtgtatcatgcactgtgcctgatacataatatctcattgcaatctagtagttttacagaaaaggaaatttaagctctttgagggtagggtttatttatcattatattcccagaccccagaataatgtctgcctcaaagcagctaagcgaggttaaacagtaactcgtccaaggtcaaacagctagctagtagtatgacgatcagcgttcagacttgtgtctgcatcatttcaagcacagtgatttcccaatcttattgtattaaagaagatgatgtggaagctggtcgaagggctgttctgtgccttcttttactaccagttttcaaattatctaattatcatcgggttaggcttctcaggataattagtttccatctgtatcattaaaagtcatttgcagagtatttccacaggggtccatctcatagccaacagttcttccttctggagccatggttccatgttgttgatgccttctgggtagatctacctaccagagtcttcagaaggtgcttcagctttaacatctccaagccagaactcctcaatcagccccacctctcccttccccacacacaccctcccaaagctctgctttccctcatgtcttgatagatggcatttccatatatctggcactcaagttagagattttggacccaacttctactccttcttttctcctaattagtcaccacgttttattgtttctacctcaaaaaaggttttcaaatctagcttttccttttcatcacagcttctactccttaattcagtacttcaccatctttggcctgatatatttggacagcttcctaattgaccttcttactttcagtcccttccatcaccagcccactgtaggtaaaattagactctcataacctagagcagatcagacattctccatctctgaaaactttgggggctatctctttacccccagggtaagacaaggttatgtcctactgtgtatgactatacttaaaaccaatcccaggcagcttttcctgtcactcaccttgtatgttcttggctttagctattttgaaccattcgccatctccaaacacccagtacattttacgactttgtgcctcccttcaagcagctttctctgcctagaataaccttcacctccttactggctcattcctgaaagcctagctcaatatcacatcctgggtgaagcttttccactcttacccccatcggactcaaggacaattaatggctccctcttcgcatttatcatagcacttccaatatttttatcaaagttagttatttgtatattaatggtctatggagccataaggtcaaggactacttaattcattgatgtaaccccaaccccaacacaagggtagttaactgttttttttagtcaagaaaaaattgtacattggctttttaaaaattaaaggaataagagtgtaaatgataagaggaagccaaatcacgtagaaggtgggataataacagatgtttgagaatgctggtctagcccacagtgtaaatatgtgttaaatttgtgaacatatctactttataaacacttgacttcactgtaggcacaacctggttccataacaaaggtaagaaataaccatgtaaagaacagattcatctcaggatcacacgacactggaactccataaaaatcagatccctcctaatagtgaggttccttcagacttggagactttcttaccctgttatgggtcacctttgccatagggcttttttgacccctgctcttctggaaatgctatcaatttctttgtttaaatgctaatgtccaggctgggcacagtggctcatgcctgtaattccagcagtttgggaggccgaggcgggtggatcacttgaggtcgggagttcaagaccagcctggccaacgtggcgaaaccccatctctacaaaaaatacaaaaattagccgggcatgatggtgggcacctgtaatcccagctattcaggaggctgaggcaggagaatcacttgaacccaggaagcagaggttgcagtgagctgagattgtgccactgcactccagcctgggtgatagagcgagaccctgtctcaaaaaaaccaaaccaaaacaaaacaaacaaacaaacaaacaaacaaaaacacacacacaccaactatatgtccaacctgccagaggaccaaccttttcttatagctatgcaaggcctcagtcatctctggaacttttcatatcttttccatcattatatgttagctttggacatgaggttttacttttatgttgtaggagaaaacactagtataaagaactgtaatactaaaaataatctaagttccttcttcttagggtaggcagtctagaaatccttgttgaagcgttttcagtggtattataggatttgttttgaagaaggtcagatctcactggctggggagtcaggggctataggatctcattctggttctgccactagttacttgggtgatctctgggcaagtcacttagactttagtcctctcctatgtctcagaaataaaaaaggttgcaaattgggaacacctaggctacatttggcccacagaaacacttagtttgcctgtaacagtatttaaatgagttgataatttagttgggaaactttacataagaacataggtttttactttcccttgagaaatcagaagatctggccacaggagtggccattcctattcatttggtagtagctaccccctttaacagggaaggggctctccagggctccagtgactccatcaattcctattgcccttttggtttgccctaaacagagacaaaataccaactgctatttgtcaatgtacttgttctcagcaatattaaaaatatttaactacgaaggaatgggaactgactgattggaatggacactgacttttgtgctagagcagctcctggatgctccccactctgctccaattggtcatggggaggtccaagaactcttggaagagaagctgaggatgagcctcactcggtgagcttagagcaccatctctacatgagttggtaaggaccatcccaatctcaggtgcgcaccatctgaatgtcagccctgccaaaactgttttttttttcaaagtggagatagatatttccatacccatggctcttattgaaaacaagaaaatgaaataaaaatagaaaaaaaaagcagaacgatttttcgtgctctggcttgctttgttcatttatgaactggcctctataaacatctgagtttgatttcctggtactaaccaacctaaaactctcttccagcttaagcataaggagcctctaattttatccattttataaatggagtgaaaattttgcaaaacatgttgaagagagggcattatacagaatttatataagatctaaaccactgatcgaaataataaatcaccaataaattatctctgttttcttatcaagcttttcaattttaaaagcactttgatgttctttttctttttttcatttttcatttagctgtggctatttttcaaatggaattaatgaccaaaagctagccttattctctaattacagtaagagacactagacaggagttgttccagacactgacccatcttggctcagggagaggctctgggcggttttactgtgtgctggcttagtacctggggccaggaaacatctgttataacatgtggtccagcgggtgccctgcttaattataaaatggcattgcagtgtccctttgagttggctggctgtagcttctaatgctatgctatcaagcaaaatgtaattcttgatgtcctgtgaactgaacctctaactcaagtgttgaatcactcagagaagaataaaaaaagttaaacctttgccctcaggaaaaaggtatagggaaagacaaaacaaagaaatgctttctaacagcaactgagaagcttagatatgagcaagcatcccttatacagggaacggtggtggggggtggggactgattccagaatgactcacacttctagaatgagctgtttatatagcgtttcctcctcttcattccagggatcctgttaggaaggtcagggacaatgacaatcaagaagcaaagggaacactggagaagggtggtgggaatgcttggaacaccaaaagattcattcaccttgaataagaggacagatttctgtaaagggttatgcaatcagctgtggcccaggacctaacaatttattgttggaacatgtacacctgggaattctttttacagtggtgtgaatctcttattagcatttatgagaacttaccttcccaaatcctcttatatgcagatgggagtatagagcccattgccagcagtgtctgcttaggaatatcttttgtcttatagcctgttgtaatcacttccagaccagtggtatatttatgatttacatcatgttacagaggaataagtcttaaggattcttttctctaaatctttttgaattattgttttagactcattgccaggtttttttttaaagggggaagttgatgaacttttaaatatgtcattacatgctccaaaatggcaactctttgttcttttacagtttcttgtagaaagacatttaaagggctgtgtgtgtccacatgagtgtgtgtgtgtgtgtgtgtgtgtgtgtgtgtgtgtggtgtttagaaacaggtagataaagaaaatgagtgaaaaggaacacctgaagttcatattttgtgtttttgttggaataagatttggcaggtttgggggaatcttatctaacatttggggagagtttaggaagggcagatccacattcattttaattatgtttcaatcaccaggggcagcaactgaagggttaagccctaaagcaaggaaatatctctaagtcagaaaacaaagggaaacttgcatatttctgaagatgacatcggatcagcttgtggatttcaagcaattatgcgatgtgatgattcccactgagtatgcgttagttggaatactgttctttttatttctccatgtcctggggttgtacactgaaagagccctgttcaacttcgaatgtcagggttttgaaggcaaaattatagtaaaatatgttttaaaacagtggggccttatatgagtgaatataacattttccaaggctttcaaaaatccttttgttaaaaatacggttcttattttgtttcttctttcctttctttctttttaaattattttcttttattcaggcttttgcctcccctccttcccaaagaaaagaagagagaagtttcaaaggatatctataacccagtctacatttagggcctggggacacataatggagttattttaaatgggacaccccacatggaaaataagtgagaaaagttcatctgtgtctgttacttcagtaccagcagcaatggtgacagtcatagtatctcagtaaatgtcccctagagtcatcttgtgagaaaaatgattattaattgaggtttctgtgagttgagaaatgggttgtttacaaaggagagaaacttttttagagtacaagcagctgaagtctcagctcaggagttgctctaaaagaagaaatgtcttttaaaaattgaattaattaaaaacaaagccaggcacagaggctcacgcctgtagtcccagcactttgtgaggctgaagcgggtggatcacttgcggtcgggagttcgagaccagcctggccaacatggtgaaaccctgtctctactaaaaatacaaaaattacacagcaatggtggcatgtgcttgtagatccagttactcaggaagctgaggcaggaaaatcacttgaatcagggaggcagaggttgcagtgagacaagattgcgccactgcactccagcctgggcaacagagctagactctgtctcaaaataaataaataaataaataaataaaggaattaattaaaaacaaaacaaaaagcaggcatagcaaaaggcatagtttaggaatgatgatgaatgaatgtcacgtttattttattacatgctatgcttcctcccaaaggagagaagtagtttgttcagtaaggatttgtatttaactggcagtaacagagaccagacttcaatgtcttaaacatccaagacttattcccaacataagagaaactctacctctggatgcacagggctcatatagtggttcctcagagtcatcagagccctaggctctttctatctctctgctcttccagtcttaggccatgatatccctctagttatcatttattctctccaatcatgaaaaaggaaaagaggaaggcaaaatgagaacccctcctagcttagttagttccttttaaggagcttctccagaagtacctggggacagggccaggtgcagtggctcatgcctgtaatcccagcactttgggaggccaaggtgggtggatcacaaggtcagcagttcgagaccagcctgaccaacatggtgaaaccccgtctctactaaaaatacaaacaaattatctgggcgtggaggtgggcacctgcaatcccagcgacttgggaggccgaggcagaagaatcgcttgaaaccggaaggtggaggttgcagtgagctgagattgcaccactgcactctagcctgggcaaaaagagcaaaaactccatctcaaaaaaaaaaaagaaaaacctgggaacattttcacttacagctcattggtcagacctttgacacacggccacacttagctgcaagggaacctggtaagggaatcttttaagaggaaaaattactgtcccaaatgaagtcagagttctgttactagtaataacagaagagcaagtatgggatgggaaattaaaagtccttgtcatactcacatataacatccttagagctgatacatcatccaaggcttattcactgcttccgtttgaattatgtggtgtttaaggcactagcttgagaacccagtctgctgtgcattatctcagagtacatggccaaaataaatactttcacacatcactgattgtttcttcatttgagtagtttaagctatggaactttttaaaaaaagagatgggtcttgctaagttgtccaggctggagggcagtggctatgcacaggcatgaccatagcacactacagtcttaaactcctgggctcaagtgatcctcccacttcagcctcccaaatggctgggactacagggatgccaccatgttcagtttaagctatggaactttttgtgtgcataactaaagagcagaaaattccacattactgttggagcttacaatcatgttttaaacataatttttaaaaaagttaacattttggaatatttgtgggcttataaatgaaaaaaggaagaaatagtaaagagtagcttcaacttagaagacactatttcctgcagggatgaccactgtaccctcaaatatcttcactgcttgaatatcttcacttctctctttcatactgcttaacattccactggttaaagagcacttctaaaagtgtcattttttttttttttttgatacagggtttcactctgtcgttcagggtggagtgcagtggcatgatctctgctcattgcaacctccgcctcccaggttcaagtgattctcctccgtcaacctccccagtagctgggattacagatggaagctaccacgcccagctgatttttatatttttgggtagagacagggtttcaccatgttggccaggctgatctcaaattcctgacctcaggtgatccgctcacctcagcctcccaaggtgctgggattacaggcatgagccactgcgcctggcttaaaagtgccattttttttaaaaaaagagagaaagttattactcattcaaaaatctgtgtcacttactttaatcagattgccttcctacaatgatacaacttcactgcatggaaggtgtttatctgtctagtttttcttctcatttgagaaataaaatatactcaaggccaaaatttcaatctgaccaaaaagatatactgtataaaataaatcacctttcaccccaaattctgagattctttccctccatgaagcaataataagtaaacggtttgtgggtattattgaagagatatactctgcatgcttaagtatacacaagtgttaacacacatacacatacccacaatgcaaatatataaaaattcttttgtttcacccaaatgagcatgtagtgtgtgtattattatgtgccatttaaagacagagtctcactctgttcccaagactggggtgcaatgggatgatcaaagctcactccagcctcaaactcctggattaatccttacgcctcagccttctgagtagccaggactacaagtgcacaccaccacacctggctattttttcttttatttttcctagaaatggggtcttgctctattgtctatgcttgtctctattcctgacctcaagtcatctcctgcctcagtctcccaaagtgctaggattacaggcaagagccaccgtgcctggcctggagaatgcttttcatcagcacctatacccagtacattaaaagaaaagactctgttaaagtagaagcttttggtaggggaagagaatactgtatttttgaaagacggagcattttgtttcaatattttattgtgaaggttatagcagcctagggcttataaaggaaaattttaagaggaaggaaaagggtggattgacctggaactctattgacctaatagctagctgtgcccaggccccaaatgtagactgggttatagatatcctttgaaacttctctcttcttttctttgggaagaagcggaggtgaaagcctgaataaaagaaaataatttaaaaagaacttctgaatttccctaagacaatccccacttacgcctattttcctatgatagtttttaatagtccccactttcatcctcaaagtggtcccagtttggatgacaaatctgtgatcactctagtagtgatcactctagtagtaactaatggacagattaactagctaggatcagctgaaaggattacaaaggtgctccacaccagctgagggtgggggcttgtctggatgagacattggctcacatttttatgagtggcatgatctgattaagttaattaactactgttttcctcagtttcctctgctttccaaagggaataataattgcttcagaatggtattataaacatttcataaaggaatgcacgtgagagatttatctggttcatatttaggctcaatatctggttcatatgtagggctcaataaatgcagctatttatattacttattattttcacatccctccttccaactactttattcttttctttctttcgttctttttttgttttgagatggagtctcgctctgtcaccaggctggagtgcagtggcgcaattttggctcactgcaacctccgcctcccgggttcaagcgattctcctgcctcagcctcctgagtagctgggactataggcacgcgccaccacgcccagctagtttttgtatttttagtagagacggggtttcaccatatcggccaggatggactcaatctcctgaccttgcaatccacccgcatgggcctcccaaagtgttgggattacaggcgtgagccaccacacccagccccaattactttattcttacacagcacaaaatgttattgattagggtttgtttaggtgaacaggcatcatctgcaaaaatgggtcatggtacagccacttaagaagaaaaaaatgaggtaagcataggaccgtgattgttacctggagggacctatcccatccctgcccaccctccggccctacagaagagataaatcagggtgtagtttgaaaacacagcagcaccttgtacttctgatttgatttgaccttggttttgatgtgaaaaatttttaaagttcagtaacattgagaaggatggaagcctcccacaattaacaaagaagaaaggcatttgagatgatagagaggcacgcattgttgctatctgtattacacaagcagagttcacaggtattcacaacctgttgatgatggaattacctcaaagagagggctcagaacttataaccaatcacctctcagcatatcttaccatctggtgtatctctctttctacatttattacttcaccccatatcgtcccttcatgactctgtttctaataccaaacaatgaatgacaattgtttgctgagacaacctgaaactcctgaggccttttagggaaggataaaggaagcttgactgagcaggagtgggagtggaaagacagagctattgaaagagcaggaacaggtattttacttcatattcattttcttaaaattgaattatgtttctgtgaaaagctgctgtgtaaaataacaacctctttatggtttcaccagctgagacataaaagactatttgtggtgtgctgtaagatccgaatgcaggtgaaaattcccccacttactcgctattttaacgaaaataagaataatgttttgtaaataacctgactcataaggatctcaaagtccttatgtcactgtggtattatatcgtcactttggctctgcatgagagggttacaagagagcttaatttacaatcacactgcagaatttccttctttttcttcttaggttatcagattttatttatttatttatttatttttggagatggagttttgctcttgtcgcccaggctggagtgcaatggcataatcttggctcactgcaacctccgcctcccgggttcaagcaattctcctacctcagcctcccgagtagctggaattacaggtgcctgccaccacacccagctagtttttgtatttttagtagagacggggtttcaccatgttggccaggctggtctcgaactcctgacctcaggtgatccgcccacttcagcctcccaaagtactgggattacaggtgtgagccaccgcacccagtcagattttttttttttaattgaagaaaacaaagtctcatttgaccctttgggaacaggatataggaatatttctggcttctgccattacttcttattcaaataatatacaattttctaaacacatttaaaataatggactcaatccaataaatagactcacctctgctgctactacaagttagtggaaaattctgaatgacaggcagcaccacaaaaactcccttttaccaaggtctgcaatgcttctgggtcttccaccatgagaagctccatggaagcaagggaaagccagttcaaccacaatcactgaggtgatgaaggggtttacaaaaggggaattcagagctgagggctaaaggcaaaatgtaaaaacaaactaggactgatgcttgcctaatactttcaccagaatttggcccaataaaatggtgatgtaaatagaaaaatgtatcggcacaggttaaaactaaagggaaatgtcttcattcactttgcatcaattccgaatttatccatatagaaaacaaggaagtcacataatcctcctagagtcaagaacactgagtatacatgggaaatgattagagcaagctcttcatttatgataacaaattacaggaagcagctgtctaataaatccaaaaaaaatgttgttcttatcttgcctggacaccccccgcctctatccttatgccagcacattaaactattttggagagtagcaatgaccaggagcatggtgctttttatacatgatctctcatccacacaatcactctgcagaggagctattgccatccctgtttcttctaaaaagagtctcagtgactgcacaaagccacacaaccaggaaggggccaagcagggattcgaactaaaggtggtagaagctaggtgctgtcactaattcacctcatctgttcttccagcactcagatctcctccatactgagtggaggcccctgttccctaaccttaaattttcctccttcattgttcatctgatttcctgttccgggaggcaaatgttgcagtgagccgagatcgcgccactgcactccagcctgggcaacagagcgagactccgtctcaaaaaaaaaaaaaaaaaaaaaaagataattataataatgcctatttgtataccttctgtatttggtgtgaatctgtacaccatcatggatgcaaaaagcattttcttgtgtttctttctttttcttttttctttttgagacagagtctccctctgtcgcccaggctggagtgcagtggtgcagtcttggcttattgcaacctccacctcctgggctcaagcaatcctcccacctcagcctcctgaagagctgagaccataggcatatgccaccatgcccagctaattttttaatttttgtagagacggggttttaccatgttgcctaggttggtcttgaactcctgggctcaagtgatctggttgtctcagcctcccaaagtgctaggattacaggtgtgagccaccacacttgcctgaaaagcattttctaaactgtaacgattttttaaatagtaattatcattactttggaccaatgtctgggaattctaaggaagtcatagacatacatgatgcaaatacatccaggcagctggtgtcattttgtgactaagagcaagtgtgcactgtgtggaagaagaaatttttttacctacggcctaggacaggccaataatataattgggatttggggcaattaaggcaacatcaggcaagaacagtatctggagaagcaatgaaagaacccagtggaaattcacgtttactagaatgtaagctctgaaagggcagggtaccagaaccgtgccttgcacatagcagccactcacaaaaatatcggttgaatgaatgaataagggtgaaacgttttgagtgctcctaattcaagtcccttacagagggcaactaagagagtggtaccaagatgtttgcataaagcaccagcctttcaggtctggcttagctggaaaaaatgctaaaaacctgagaatttgtttgttggtttgttttttaagagggaagttaaaataggcccttgtagtttgctttcgactagcttgtctctcccattaaaatctaaggtccctgagggcagacaaaaaggcaactggcctctagtaggtacccagtcactactagctgaattgttgagttagcttcctaaaaaagttataaagtcttggagataccctctggaaggcaattcttttcgaagcaaagaagaggcttcttgacgagtggatgaataactagctcatgtttgagaacacagcaaggaatgtgcagcttctgtacaattgttgacggcaccagggaggcagaaagtgatgagagagagagagagagagggagagagagggagataggagtctgtccatttgtggttcttatttatttggaagatgaccgatccactcttcccagtagaatataagtaagtactgttgcagtgtcaggggagagaggtgactatattttgctggccacagggccagctcagagcctgacatgcagcctggctcaatagggaattgtttggaactaccattttggaaaatagtttggcattatctagtaagacaggcacaccctcagtaaaaatcctcaataagctcttgcacgagggtagcaggttacgtgtgcaaggaagctcctagcagcactgtttgtaacagcccccaaatgcaaccaacatgtgtctatcaataggataaccaaaaaaagtcatatattcacccaagggactattacacatcaagaaagatgattggaataaatgaactgtagctgcactactagaaaaatgcaacacatagagaatgaaagtccaggaagaaaaagcaagcaaataaagcaagggatggtagaagcttttgcagaaaaaaccatcctggtgatactagatgtcttgaatattgagtttctcaggctgggtatctggaagcctcccaacagaatacagcacaatttggagagaagtagctaactaatatcagcttatccttggcctcaataaaaccagtgtggaactcttaagagaaggattattaggccaaaggaatatgacaaaaaattgaaaatgaaaggtaataggttcactctgtctttgaaactcttacctacagtttaataaagaaagctcggtagcaaattcaatgagaaatagctgcaaattatctaatatgtgaagtttaactgcttagttagtctgtttacagctttattcataggacagttattgagtaactctcaaattaaactccttgtttgagggcccagatactgaaatacaggtatatcctagtacactattgattatatttttggtgcccagaaagggtggatctgtttgcctcctgggttgaaaggaaggaggtattctagaattaataattcaaatagggctgttacaccaggaggagagaaaagagtgtcaaggcggtgctaagaatctgggaaacctgccagcatggtttgcatgatgagtgtgggtaaaaatataaagagaaacatggtccagtggttgatttgtttcctcttcctttataagggtggtttacttttaagcaaaattatgtgattctttttcaagttctgttaagaacatagttgataacagatctcttttaagaccagagtttctgcaagcatcatgcccgaccataagagaatttgatcactttgtgttttcctgcacctttcatcatggcagagagcgtactctgaagatttacatgggatcatctcttctctggccaccttgtggaatgcaaactatatcgccatatctaaaggggagcccattacaatttacaaattaaaagtcagtgggaaagaacataatcttggcaactgcctcttgggaaatcttacaactgcaagagcgccatggaagagcgctttaaataccatcgtgtttcatccaatctcctcacaattgtataggagggcatgtggccaaggccttgcagagaaaaggccggggtgcccaggctcgtgattggctggggggcgtgatgcttaagcgagccacttagcccgctcttgcttcatgaggagcacgccacatgcttctttgcaccttcttttaaatccttgtgtggttggcatttggaaaaatatcgactgcaaccagaagtcgcaatcctgatgacagctcccgaaatctcatctttctcgcagcaacatctactgtcagctccccacccctgttacaagagagccttccccacccaagttgtgctccaaatagaaagaatttcagatgtacatatttggctctctcctctagaggccttgacaaatattcaggtagtaaacagcctgagagaaatgctgcgataaaattagttcaaatatttcccagaaaacaaacctgacaccaccatgatacttgatagctcagcctcagcactttcgaacctttccaaacccctttgccttcaaagcccaaatgtcctgttttaaattgcttttatttttctcctttccaaacctgatccttgctacttcctcctctcaaaaaaagaaccatatggtaatagagtagattgtccaaccagggattttacattacaaatgactacgttgaaggttaatatccaaggtcaggtgtcattaatatctatttgaattttgttcttctggttgatgatatgatctcagtcacctcattgatttataacatggtaatcccataccatcattcattttcctgaaattctattcatggcctggtatcaaaccctctctttcatacccttttcgttttgtctgatcagtagctttacagtccttgcatttatctccttcccacaggtcacactacaccttgcatccaagattgtttgattgattttcaccttctctttttcctaaatcttactgtagaaaaaaaaatgttaacccttctcttgagtattttacagtacttcactctccaaagccagttcacatcttgattttcaggtaagtagcctctgtaagtacataggcttgctgatttgtctgtatcaaatatgaggcattcgctccaacttagctaaagttcttggactcaaactcctagcaagagctaacaatcctcagggctcactatgtgctagccactgggctcagggctttgatggattcttatctcatcctcacaaaactcctgtgggggtttgtgtcattatttcacccactcagccgatgaggaaactaaagttcagagaggctaaggaacttaaccaagatcaggccgcatagtaactggcaaacttgggacccaagccccacagtccatctatttacaaaccttgtggatatcactaactttcaaactgccttcttctaactattaaagtgaaaatttgtggccagttattatagatgatacagccatcatacagagggggttgggaggcctttgcaaaacacatattatttgtaaaattatctctgcacctggcatacctacatacaaatatttttcttatacatctaaacataaaattaacttttaaaaagcatttgaaatgtcgcatatgttaatatgaataacacagacaattcttacttagaaggaaggaaaaaaacccaccaatattcctagcaactcagagaccaccacagttaacatttaggtatacagccttcttgccatttttctgagcatgagcacaatttatatatttgtaatcttttataaatcacttcttcacaggtattttctacttttatggttgtcatcatttctaatatgggatcagagacacagtggaatcttttttttttttttttgaaacagagtgtttctctgtttcccaggctggagtgcagtggtgcaatctcagctcactgaaacctccatttcccgggttcaagtgattctcctgtctcagccttttgagtagttaggattacaggcatgttccacggcacccagctaatttttgtatgttcagtagagacagggtttcgccatgttttccaggctggtctcaaactcctgacctcaggtgatctacccaccttggcctcccaaagtgctggaattacagacatgagccaccacactcggtgacacggtggaattttgataaatgtgctgaatcattagatgaaatctagtcattcattaataatttcattaggtttttgagtatatattacatacacttgtccaaaatttaaatgtagcataatatatgtagcaaacatctccctcctactcctgactcataaggataccttgctctccagagcttgaaagcctaagttcccaaatatcttagtacccacaacttaggagcatatgcttggatgagttagtttcttaaattctgaacccaaaagaacagagtccatcaagaaactctgcccctagcaaaagtccaacttcgaaggtcctgtctcctgccttaggactccaggtcctcaggtgagtgacacacccttctgaagagcactatcttacgctacaggacccaagaattgatcataataccaagcaccacaataattcccacattatttaagagatgctcataaaggggggagaaatatttttatcatgcattctcacagaggaactcatgagagcctcttaggggacaaaatcaatcagtgttattatttctgctttaagccagtggaatctctttactatatgccagtgtttaaagttcagtatgatgaatgttagtgcttctatttttatatatttattagattgtatagacaaagtaccagcccaggggaagacagccttggagactggaggggaatatttttaaatgtagaaattctcaaagtccattccatagaatatcagctccttggtgtgttattaggtgctccatagcaaaggagggttccacagacaaatatgtttagaaaatgctcattaaaggaaagtcggttgcatttttaattgcaagacttaacagaacttttaatatcacactgtaaactctgaaattttaagaggagaaaaaatgtaaaatgaaactgaccacagaatgcttttcaaggactagggttccacacagcaaactttgggaaatggtgtgagattctgacagctttggcactaaaaaggtgtatgacttggggttaggtgactaactgttcatcactgtgtgtcagtttaatcaggtaattaagtaaccaacatcaacaaattattttttatactggcttttgccagtaactattagaagcagatatagaagacctgtgaaatcttgggttcagacgagtgttcttttcaatcttgctgtactgctttagagtagcaagcacggtgacatcatttggtactaaaatattattactatgcaaccatgagcctcacatttctccacttgaaacataactaaaaattaaaagcttttgagaaaagtgattctaaaataaagttaaatgtaagccaggtattggagtaaaatatttgcaatgcatataacctacacaatattagcatccagaatacatacagtcattaaaaatcagtgagaagaagaaacaaacaactcaatggaaaaatgagcaaaggatagaaattgaggattcataagctataaacatatgccagtaaacatatgaaaagactttctaacttattaggaaaatgcaaattaagacaagatatcatttcacatctatcagaccagcaaaaaattttccagtctgacaaggtaggcatggggattggtacaataattcttagaatattttagcaatacttacagagttaattaagtgtgcttactctacgacacaggatggccacttctaggttatttcttggggcagtattttccaatttccccattatgacacacatagagaaagataatactcatagagcacagtggggtaagccgaggaggctgctcatagcaggaggtgcccatttagggggctgtggtcacctcaggtcccacttcttctacccaactgtgaggcactgctatacagaattgtatataagctctgccctagagaagcttatttctgtgtgctcaagaagatgtacaaaaatgtgtaccacagtatttttatcataccaaaagccaagcaaaacaaaatgagaaaaacaacttagatgcccatcagtaagggaatgcataaaagtattataggatactacagttaatattaatagcttgaattacaaggatgagttgcaaaagcataatgttcagtaagaaaagaaaaatgcagccaggtgtggtggtatgcacctgtagtcccagctacatggaggaggctggggtgggaggattaattgagcctgggaggttgaggctgcagtcagctgtgatgacgccacagaatgagaccttttcaaaaagagaaagaaagaaggaaggaaggaaggaaggaaggaaggaaggaaggaaggaaggaaggaaggaaggaaggagagagaaagagagagggagaaaaaagagagaaagaaaaagagagagagagagagaaagagagagagagagaaagtaaggagggaagggagggagagagggaagggaaggagggaaaaatgcaaaagaatacatgtgctatgatactcagtgtacaaaaccttaaaaccatcaaaagtctatatacctacatagtaaacatataaaaattatgaatggggaggatatgaccaacttctagatagcaattgcctctggaaacggaggagaggcagtgggatttgatagtggatgaggaagtctaaggatatctgtgacattgtatttcttaaaaaataaaaataaaacaaatgtggcaataagtttatgtgttcaatctaggtagtaaatacatagttttaaaatacattttcactatttgtgtatatgacatgtcttgtaattaaaaaacaggaataactagatcaatggtttcaagcctggatgtatattagaattacaaggaagtttttaaaatttttcatgctggggctgtatcagagaccaattaaatcagaaacttaagggttggggcctggacattgcattgtttaaaagcttctccagtgatcatagtgtgtagctttggatcaagaactgcaatattagatgatcgcaaaggtttctttcaaacaacattttctgtttctaaacattttaattgcagtttcctcatatggcttcatgtgaacacaattgtgtgtaacatgaagttaggccctgttaatattcactgagaactttccttctgtcacaaccacttatcttttcctggtgctcatgattcttttgttttctagaatcacatgtttctcctctcccatttaagttgttgttcatccctccccctttctcctcccacctttctgagtccatcccaacaagcaattcatccaagcaccacaaatttaagctctgagtcattcatatgcattgcttttgaacatattaaatagatccatatgcttatctatactaagatatagatttttccttcagaaaatagaatacaaaaaaatcattccaatgtgtacactttaaatattttaagcaggcatctaaaacgaagcagaaattaaagtaacttggaccagaattttgaacattaaaacattacagcaaattggtaaaacataaaccaaatatatagatgtctactttatatccaaaaaagttactctttccctgccatacacacagacaactctcataatgggtcctcctcaattagagttggatcacaagcagaacagtaatcagtgtggcctttcccagcatttccacccccaaagactctttattatccttcccaacttcagaaatttctatgacatcatcatcaaccaatcagagcttctaatggtttgaaataactgatgtagccagacacattgagttgatatagaatcaaagaaatgtgacattctccttagtctgggcagttgtgtcatggataaacatatgatttccattagatttctcaaaacacggaaaaatcgctttcagaccttagcactacctctgaagatacttattttagattagaactactaactaaagtgccattgtcttaaaccctaccaaaatctgatctcagggacagtaagaaaaggaatgctgaaatacaatatatgtcaacagaccaggaaaacttccagcaccacttaaagttcattggaaagcagactgatgcccccaaaggaaaaaaaggcaagcaatcatgccacagttataacaacagacagatctgagttttatgtggatcctacagttttctaaggcatgaccttgggcagattactttaccattctaagcttcagtttccttatatataaaatggagaaaataaaaatacttccatacctgatgcccagatctaaatggctaattttgggggaaaggaatgtacaagagaagcctgaagcatcttgcaatgccagaaagtaaggaaggactaaaaaaaattgatatgtcaaaggaatatgagggtaaactaaaagagtaaactcaagtgtaagagtaaactaaaagagctctcaacagacaaagttgtcataatttgatttttaaaaatttggtactaaatgcaatagactgaatttttgtgtcctcccaaaattcatatgttgaaacctaattccctgtgtgatgttatttggaggtgaagcttttggaaggttattaggttatgaaagtggagccctcatgaatgggatcagtgcctttttaaaaaagatccagagagctccctcggttcttcttctatgtgagaacacagtgagaagatggccatctatgaaccaagaagtgggcccccaccacacatcaaatctgctggcacattgatctggggcttcctggcctccagaactctaagaaatagatttctgttgtttttaagccacctagtctatggtattctattacagtagcctaaacagactaagactttggattataaccaaaagtgaagcacaaaatttcttgagttcatactgatataacaaaatgattgcatatataaagaaatggggggtggaatagacacatttcacatacagaagaatatcaatttgtacagatactttcccctcaaaaaggtggaatataactccctaccccttaagcatgggctgtgcttagacattttcttttaaagagtaaagtatagagagaagacagcaggagagtaactttttagcggagaaacctgacaaatactaccttgtcattggttcaaactcaatattatcagtgataaatcatgatggtagcaggaatcctttatatgatgtgatggacactttatctctgtggtcttgttagggtaggtagttaggcagacaagaccagtgcaggagatgccccccccccaccccccgcccgcttccaggaatgtcaggtgaccattaggtgatgatcaggtggttcttaaactgtctctctaaattaatagttggtcagagctggtaccagggaaaggcagtctcccaatagataggaaggaaacacctgaagctggtaatcagcagcttcctgataagatctcagaagttgggtgagcaggctcaagcatgtgcactaagaggatttaaatgaaatatgacttttctccaggaaccatggactggtaagggaaaaatgcctcgagtgagcacacgtacaacttcagtaaacacactgtgcatgtggcccctccaaagtgctgacaggccactgtgcatgtgcatagcccaccccaagggaagaatcaggggagaaaaaaaacacagaccctggaaccatgccaatgtataaaaccccaagtccagggctgaacaggacactgagaactctcaagttgcctacttggccctcttccaagagtactttgcttcctttcactcctgctctaaaacttttgaataaacgtttactcacttctgctctaagactggcctcagtccctccctctgccttatacctacttctggccgtcagctgaattctttcctccaaggaaacaagaatcaagtttgctgaagacccaggtggattctctgctggtaacagacttcctcccaaaaacccatcacccggtataatcatgagagaaattaaattaagaaacattctatacaatacctgaccaatatgcctcaaaacttacaaggttatcaaaaacaaggaaagtctgagaaactgccacagccaagaggagccaaagaagacataatgactaaatataacgtggcatcctggatgtgaccctggggtagaaaaagggtattaggtaaaaaaatgaagaaatttgaatatagatggacttcaggtgatcattgtctatcaacattggtttctgaattgtgacaaaatgtaccatactaaagtaagatgttaataatcaggacaacagagtggagggtatacagaaaacctttatattatctttacaacttttgtataagtctaaaactattctaacataaaaagattatagactgggcacagtggctcaggcctataatcccagcactttgggaggccaaggctgatggattgcttgagcccaggagtttgagaccgacctgggcaacatggtgaaaccctatctctacaaaaagtacaaaaattattcaggtgtggtggtgcacacctgtagtcccagctactcaggacgctgagatctattgaacccagggggcagaggctgcattgagctgtgattgtgccactgcatgataacaaggtggcagagcaagaccttgtctcaaaaaaaaaaagaaaaagagattattaagaaaaatggttacctcatagggtggttattctcataacaccaaacttaaagcgtttagcacagcgtttggcacatagtacatgctaatacctggcaactattattggttagcattattaagcagggttaatccatgagctgcttagcaatccatctcaaaagcagaatactcatattacttgaagaaagatccgataacttccaccaccttaagtgtttattcatgtttttacaaatcaacggtcttgcgaatcttatcattgttatctttgctgggcaagtctattttcattaccatcatttttccagcattattctgtatttaagataaaactccaaggaatgaattgtattatgcctctggattattaaactctctcacctttctgtgtagagctcggtaatgttccttctaataactttcttccaatcgtgtctccttagccaacaaatttaatttgtagtcatatgatcagaaatgtgctgcacatcctcccagtgcactggaacatctttgtcacactgcaacattggctatggcctaaaaaaatacatttcaccatctggtgtctgctcaccacaatatctccatgtctggttcctacttaaacttgcattccttctacttcattcattaagcctctttgaccctgcccccaactcagattggaagtcgtgttaccctcttctgagtgctttgagtactggaagcacagtcctatactgaaggtttctgcaggcattctgtgtaatctctcctagtttgttaactccctctgggctaaagccaactctgctgtacctggtaaccttttccacatttagctctgagtccagcacatctaggactcccagtaaacatttattgaagtgatgctaatttgaatgtcatccaaaaaactaactcaagcactcaaatgagcttgcctaccaggaggatttatctcacttagcagagcactcccgaataggctttactgagttgtctgcagagaccatttccaagaactgataataaaacaaaaataaaaataaatgccactagtgactgccttattttcctattggtttgtttttgtataattataattcttctggtttgtttatcggagtcagtcatcttttctttttcttattaaggccagttacagtatttttggtaaattaacaaatacagaaatggttatcccaacatgttccattccttcaaggtcatgagagggaatgctaaatcagacaaataggtaaaataagacttttgttatctgtccatccacccactcatccatctgtttatgtattaacttatccatcctacttcaatagtcatttacagatgcctaccacatgccaggtgttatgcaaaacactgcagatgcaggggtgaataagaaaggcctatccctcaaagaggtcccaatctagtgggggaaaaacagccaaataaataaataagtacaaattcaacataacaagtgctattataaggataacataggacagacactctagttggacatatatgctcatagagtaatgattcttgagccaaaacaaacaaacaaacaaatcccaattatattagtctgttctcacactgctaataaagacatacctgaaactgggtaatttataaaggaaagaggtttaatggactcacagttccacatggctggggatgcctcataataatggtggaaggcaaaagagaagcaaaggcatgtcttacatggtggcaggcaaaagagcttgtgcaagggaactcccatttataaaaccatcagaccttgggagacatattcactaccataagaacagtatggggaaaatgcccccatgattcaattatctccacctggccctgcccttaacaagtggggattattacagttcaaggtgagatttgggtggggacacaaccaaatcatgtcaccaatcatgggttgtttcatggattccttcaaatggcttccatgtcttgtagaggacttggaagactgggaatgaagcctcacctctgacatttcctaactgtgatcataaacaagttactgaactgccctaagtctcagctgccttctctgtacaatagtatcattgcagtccttgtttaaaagttcctgacacgggagatgtgtgtaaactctaaagggctgtaagaatataattaattagttaatgaattgcaattattattattatattgattacaaggcaaaggaaaatatttttcccttataacctcctctggtccactcaatctccgcaagaattggaaatttttggtaggaccagttttttctctttatctatttagtcaaggtctacatttctgcttttactagactggtgtctggtggcttcctcagaaccctgggtgccaagatgtcagtgtatgctgtgacagagcacctggcagattgactttaagcctccatatgtgtgctagctaccccatcgctgctcagaacaggaggtccaaacagcagttttggatgctgtgatttttagaactcaggtttttagtctagtcagatattcattaatatttcgggacagccaaaaaaaaaaaaaacctaaaaaaaaaaaatcaagagatgcaacatcttaaggaagaaagtttggatcctgtttgaaaaaaatagtagtgattgggggttggggagaagggcagtagtgtcccaataccagctctgagagctggcaggggctttgtggcctggatgaattcaaagcaaacaggcctacaggacatgaagccacatgtttttctcgtgagccccacaaatataaagctcccttaatccacactaaaataaaactgaaatgtaagccggccccgatctgtatgcagcatgacctcttccaccaccctacagttcattcattctccaacccagtggttgccttgccacgctaattttacctcgtaaaaaattcttcctcatccctcctcatccccctcccatattcttttgacttttttttttttttttttttttttttttgccacccaaacagcatcccagaatgcctcatttggtgacatcacagatagccatgggttgcttctggtgtcccatctgttcctgcaggccttgcctcagtgcgggtgagatatgaagggagtgttcagttgaggctggggtgtgggtgggggtggggatcgggcctttgaagctgttttctatcagggcactgcagctgtcagtgttggctgcggaagccagtgattgtccttgtagctccctgttgccggcagtgcactgtgcttgcggatattaattgggctttcattatgtgaatgaacccagaggcttttgcagccgattcctatatctatattgatttattaaaaatgccaataaataatagctctcgcaaagcagcttttaatgtatttgataattagttggtttatgtttttttcaccatttttctccctttttttttctttttacacatcacagcataatagatcacagaatctttgggacaacgaacaggcacattggctaaatcaccttattacacttccatatagttgaaaagaggcttaatgttaaattatgagatcccagctattgtggaaaccaagaaagaataatgctccaaaataacgactgtggcgcctctgtgccactcattgtcccaggaactgttggcacgcctcccatgggagctctccattgagtcagccgtcctctgaaatgaacagtggggcccaaattcaggtggggagcctctttactttttggtgtattataggctataagatatcttaggacctgggctttggggaaaaaaaaacaaacccaaaacccttatattacatttgtgtgtaactgtgggaaaaattggcacaccccaaattcagcatgtcacaggagacttcagcacccaggatactatatattatccctcaaaaagtggagacgaaaggagaaattgctcatttgtttcatttcactgaaacttttcaaaggaagaaaagatgttcattaaaagttaacagtgaggcagttttgctgaactcctaaagaaaatgtcattgtcacaggagcctgtgacccagtatcattctctgtagctgaatctaaggtgcctgtggtctttgagccattaatggaattgaaaaagaagagaggtgccccaagaatgtggggatgcagatggatttgggaggaccattgttatagcctgcatgtcatgactttataggaagtaaatataatttggattctaaaaactaagtaggataagagatcctaacgaagctcttcctttcagttctgggaagaggagttgaaattgatttctttataataaatgatttatgtccaattctctctctctctttctttctcactcttcttctttaagtaaaaagcccactgatattagatgggcaatagtggaaatatggaacaaatgagaaaaagcaaaactgaaccttaacaaaattgctgttgtcatgttcaactataggttgtttctgcagtgttacatatggttatttctaatgcagtctctgagaaaaacaagcaaacaactgtgtttcaggtaaatatgcaaagataactgtgtatttgtgccattggacaaattcttcttgaacagctttatgcagttaacagttcagtgatgacaatggaactttaggtagcaaatataataactaagtgctaattttggagaaaacaatccttgtttctgactatttaatatggcacttctctttataaactgtaaaatgggtaaagaataaaagtatccctttatcccccccaaaaagattcagaaattattcacaagtctttatctggcccaaaactaaggacccagggtcattttaagaaaaccatcacattcctattcaagaccatatgaagtcatgcttattactttgtaaccatattctctttcaacttaataagagaaataaaaagacagccagcaatatcatgcctaacctttaccccactgaggtgttctgacatagtagctatacaaagacaccattattaattaaggtatgttaataaggaagaaataatattccattcagaagggtacagagaagatataatgggtacgtgctgcttttcagagaaccaagataaaacagaaaagtgacacatacggaggagatggcaccatactgtcattctggttttctcatgtcgcctgggtggtttcctcagcaatataacatttgtagtaatggcctccattcatttagtgcccactatgctccaggctccatgtaatgtgctcacatatatgaatatttcccatactattgagttatattactggaaatgtcaagaccaaaggctgcttattgattttttttaagggcttagagtggggtaaaatagtagaggtataaaaaaacaaagaaagatacttatcttcatttcgtggattatttctcagttttcagtttaatttctctctcaactaaccttgcagaaatttagggcctatgggaaggggattaacttcataatacctatgctgtttcttttccccgaaacatctacaatttatcccccagcttctgtattatttctgttaccatttccaaataatccttatgccagctctgaaagttcacctcagtagtcgctctacattggaaaaccagccctgcaacaggaaggaccttctctagagcagccatattttctgaaccccacactgagacacattgtctaagaagttgggacctatttgaaagaaaaactggttaaatttgtgaaatttagactcacagaaaatccaaagcacagagttgacattcttttaggaatcccagggttacatttcagaactgcacagcagacaacccagaagtccacagacactgggattctttccatactccgaacggattcccgacaagaagcctgtaggctctgcttctgccatttgcgctgttttagaatgtttgctccaggtcaccgagtaccttagcaaacgcagcttcataggaatgaacaggcagaaggtccgaagagtttgagggtgactgatggatctttatggagcagagcaagctgttaaaaacaaaatagaacaagaacaaaggggtcctgtacactcgaggagtttactccactaacagtcttgctccgacatgtgaatcttttagatcggtgtcagctcaacagtgatattctatgaagtcattcagtgtaggcatttgatcatctagacctgtactgcccaatatagtagcccctagctacagatgactactgagtacttgaaatgtggcttgcatgaattgagatgtgctataaatgcaaactatatgggaatttcaaaaacgtagaacacataaaaaagaacacaaaatatataatgtacaattttttatattgatcacatgttaaaataatattttgaatatatgttgttggaattaattttaccttttcacttttagaaatgtggcaaccagaaaatttaaaattacaagtgtgactcttgtttaaggctcacattatatatttccattgaaagcactggtctagatagttggatggaataataggacacgatgttataggccaagacaagtcttctgaaattatctttgctttgttcttaattttgcagctgacattaacacaggaattctaaataaagtatgaaaagatgttttatatgaatactttttttggtataaatgtatttttattagtgagtctctcttttagttaaaaataggcaaaaaatttgcaagtaatcaaaataacagcttgaaataaaaaattacaaatacctaccctttggtttttaatttttaacgttgcaaagaattataaataatgattgattttgtctccctgcccccagaagagttaagtttacttagatttgattttaaaattcttgaaagccagaagtcatgttcaagtgaaaaataaaaaagtcagcattaggcatctggttattatagtctttactttgaaagaaataaaatactgcaatattcagtgagagttgtttaaaagttgcatatatcttctaggttgtattgctattcttaataaatcaagaaagttcttgtggtttgagttaagcaacttggtaaaataagtatgtgacatttaacttaagccacagagtattgcccaaatgcactcttgtccctggccatctctcaatgttcagattcttttataacatgttgaaatcatcttacatgacaattttaccttggagtacgtaacagctaatcagctgtaacaaacaatactagatcaaaggcaaaaacacacatttttcttcactagtaagtcctggactttaaaacttcaatagcaattttaaagcatgtcttcataatgaatagtgtattgcaagcagcagaatgcattctcaacagtagctttatgttctgtttacttaaaatcgttccatatgcacttatgataaattacttaatctttaaacataaaatgtcttaactcaaggataagattcccactcagtaaatgcacagggatcctactacttcttaatcagaaagctaaaaatatgtgcattcagaaacgatgtttgctgaagtacttgcaagcctaagcctcttcattctaaaagggatatatccaaggctgacaccaaggagatgactttgcagaataaaagctacatgtttttcccgttaaattttgttttgttttgtttttttgacccaactttggattgttgaggcatcaggta

SEQ ID NO: 398 - DNA, 106026 bp, Homo sapiens
  source 1..106026: mol_type = genomic DNA
ggtcagtgtgtccaaggcctgtgggtacatctgggcaacccagtgtgtgtgtgtgtgtgtgtgtctgtgtgttgtgttgtgacagccagtgttgctttgtatctgtgacgctgtgtatctctttgtattggggtcctttgcattcacttccaggtgtttggtgtgtgtttatgtgacattgtgtatcttcccttcattagtgtcatcttatttatttagttattttttttcagacagggtcttgctctgtcacccaggttggagtgcaatggcactatcatggctcactgcacccttgacctccccgggctcaagggatccccccacttcagcctcctaagtagctgggaccacaggcatccaccaccacacccagctaatttttgtatttttggtagagaggggttttgccatgttgtccaggctggtcttgaactcctgagctcaagcaatccactggcctcggcctctcaatcatcagtgtcattctgtacatcggggtgtactgccacaactgccagtgtgttctggcactgcgatgtgtgtgtgttgtgtatgtgtctgcgtgtaggaattgtgtgtctggaaggtgtcagcgtgtggctgtgtgatcttgcatgtgtctgtgttctgcaggaacatgcgtcagtgtgtgtgcatcagtgtgcatctctatgtgtcatgcactggtgtgtcttcgtgtatatcagtgtgtgtctacgtgacgcctgctttggtgtatgtctatacgcggttccttgttgtgtgcctggataccatggtgggacggtgcatgtcagagcgtgggtcgtgggtgttttcccagactgctgtgtgtgtgtgcccgtgtgtaggggttgtgtgtctgtgccttgtgtgcactggtgtccgagtgtgctttgtgttcgaaggcggaacgtgtggccaggcgttctggacgtgacatgtgtggcggggtccgagtcccgctgcgtgtcagcgtgtgtctgcgctggaacgcgggccagcacgtgtcagggcggccgcgtcggtgtgcgcccccgcgcgcgcgtgtgcgtgtgttcgtgtgtgtgtgtgcatgtgtgtgcttgtgtgtgtgcgccggccgccgctcccccgccctgcccgcccctccccgcgcccctcctcccgcccgcgccgcccgcccgctccctctccccggagtgcgccgcttccaaactttgtctaaactttcactttcacagcgcggcggctgcggcggcggcggcggcgggcgagggtgaccggccgagcggcggcggcatggagtagacgcgcggcggcagcggcggcggcggcggacgcgagaggcagcggcgagcgcggcggcggcggcggcagcggcggccccggagccggcggggccgagcttgcgagcggcgagcgcggagcggcgccgggccgagcgcggggccgcgggccgggcgggcgcagcgcggcggaggccggaggagccgagccggagcccgagcccgagcgcggccgccgcctgccgggcctcccctcgccgcggccggccgccgcgctcccgcccgggcgcccagctatgtactccccgtactgcctcacccaggtaccggccgccgcccccgcgcgaccgggggaggggagcgggcgcgggaggccggccggcggcgcgggcggaggggacgcgcggcggccgggaagggggggccgagagcccgcgggccgccgaggggtgcaggctgtgccgcggggagcccaggcacgcgtgcgggcgtcaccgtgcgcgtgcgaccctggccaccgggcggactccttttgggggttccgggggtggccagctgcgtcgtggcgctgcccgtggagcgcaggcgggagtgcgtgtacgtgtgtgtgtgtgtgtgtgtgtgtgtgtgcgcgctcgactggggtgcgatgggcagcgggactccggctgacctgtgggctactgtagcgcgcacccgggcagcgtggtcgctggcagtgtttgcggggttgacagagtggcaagagggtggtcccgagggcgcagaggggacactgggtcccgcgacgcttcctggggagggcgcagcggttcccgagggtggcagtggccggcgtgcgtggcggcggcccttgcgtgcggccggggtgcctggggtgggccgagcggcccgggcgtctccccaaagtctttgtttaggcctcacatgggagcggggctaagaaaatggcggggctcccaaatttcggaggggcaggggaggggagaggggggcgggcgcgctgccagcggtggccgcgcctctccgaccccggacgtcgcagcctctgcccccccacccccaaactttcctcggcgcaaactttctggccccagcgacccgggctgctgcggagtggacccggcaggcctggggaatcccgtcccgtcgcctggaggcgggaggggcgggaggcagccgtggacacagccgacagtgctgcggccacaccgtcgggtcagcctcgggcacaacagcgccgaccttggcgcgttgctagagcgcgtcccgcctgcagcgaagttccctgcgcggcgcacggctgcggcaaaagcttcgaggatgcctgtcgggccacccaactctccctgggctgtggcctgaggctctaagagggcacagaagctgcccagagtcccacagtggccctgacagcgttgcctgcagggccaagccacagctggtaacagtctccgaagaggggacatctaggggctgcttagccctgctgccagccaggcctgcatgtgggggttctctaggccaggccctaattgtcccctctgcccagcctgatccttgtcagccatgtgccaagtgtgtccacagcttacagtggcagtccacatgggtatggctcctactttgtctgggtcctaccgggagtgtgcagtggtgtcaaggggcgaggggtttgtcggggtgtgtgtcagctgtggctacaccacactcctgtatgcacaggtgagagtgtatgcaagtgtgaatcaatctagagtctgtgtgtagcccctgtgggccggccatgggcaggcctgcgtggcatggccgtgtgtgtggcccagggagcgggttttcctgtagaaagcaggcccaagtacgtgttggcgagggcgcaccggcatgcatacatgttgcagtgtgcatgcaggtgtgagcaggcaccctgagcaccatggcagtgtggggaacccccacatctgcacctccagttccacggccactccatgttgggcgcccctcacaacaactgcctacccagcggtgtctgagctgggcctctttggtgctacacttggctgggctgtgtggccgatgtttggggcctagtggaaccaagaccccacgctcaagcagccccttgcccaccaggctgccagcccggcctcccatgccaagcacgccagacatctgagcctgctcccccatggcttgggtgagacaccagcccctcagatttcacagcaccctgggagagaaaatgcctgtggatacgccggtgacatggctaggaaggggctggggcggctgcgagacccagggcgatggccggtgcttggctctgtgtgattgtaggcccaggttacgacagttccagtgtgccaggatggctggagaggggagtgggcatggtgtctccaggctgccagcccttcatggtgggcagggaaacccttcagctctgggcaggtggctgctgtcggctggtcagtggggtctggcctgcccctccctaacaatcacatctctgtttttacaaatctttctgcttccatggtttgccccgctggtctctgtttttatgacaacctctttcctttgctgtctttttctcggtctgtttttatcggtctctggtgtattctgcccttttccatctctctttctccatctctgtccttttgtatgtctctgactgtctctgtctctgattccagttttggccccatctctgctcccccctccactggcgtctcggactctctctctctctgtctctctggcctgcctctctctctttccctctctctctctcccttttctttttttcaaaccagaattggcttcgattttaaagtcaataaatgattgagcaggaacgagcttggagcagcggggccctggcggggaaaggtactgtgggcgagggggaagggcggggggaaaaatctccttctagaaaaagcatcgaaattcagggcggccgggtggggcggttcctggagctgctggagtccattgtagccacagtcctgagtctcaggcggagagaggggtggggggtggatggatggacccccatccccatcccaaccctgccaagaaacagagacacaaccaggatgtgaactcacgtacaccaccatcaccgccaagatggggatgtaagtgtcctgttcacaccgatgtccagacccacgaccatcgacgagcctacagacctacggacacaggaaaccgacgacttgtgttcacactgtcacacacacccattaacacacacgcacctcttgaaatgggacacgtatattggtgtaggcttagcgacacagcagtacctctttgacgcacgtatggacacaggaaactgtggacttgtgttcacaaccacccccagcgcacacataaacactcacaaacccctcgagatgatacagatagcgacgaaggcacatggagaccacgacacctcccagactcatggagccctgagcacatgcttggatacaggtagacacaaatgtgtgttcacccccacacatgctcacatggacccaaggacggacaggcggatggatggatacacatctttacacagagacataatgcagttggctcgctcaggtgtgtacacaaataacttttctttttctattttttttttttttgagacggagccttgctctgtcgcccaggttggagtgcagtggcgtgatctcggctcactgtaacctctgcctcccgggttcaagcaattctctgcctcagcttcccgagtagctgggattacaggtgcccgccaccacgcccgggtaatttctgtattttttagtgaagatggggtttcaccatcttggcccggctggtcttgaacttctgacctcgtgatccacctgcctcggcctcccaaagtgctgggattacaggcatgagccactgcacccggccacaaataccttttcaaacacacacacacacacacacacacacacaaatatgcaccaatgcgtgcttccccctccttgccacagggataaaaaggcaaacatgccgacatttgctgacacacacaaagacatacatggccgcacacacggatacacccgctctcagacacgcagcgacctacgcccattttcctggccatacaagcagccgaacgttcctgtacttctgtatctgcatagctcccccaacactccttccatgggagggggatggctggggcttccctgatgcccccttcccccagctttctctctgggtcactctggccacccctctgtccctgcgaagctatagctctctgtccctgctccggcctggtgccctgttttcatggcacttggcattttctctccggctctggccctgcctgattcatgcccactgctggggtgggaggtgtgcccaggtgtgggccgggatggggtagctcatgagatgagctggggctccgtgagatgttttgatgctgggccgagctcagagccgagggctctgccgggaacagggtgctccagtctctctagggcctggaatgtcttgtgtagcctcaagagctcccagacggaggctgcgggagcggagtcaagggctaggctttgccgtcagacagaaatgggttcgagctccagctctacatgttctaatcttgcgacctgaagcacaggattttcctggcctgtaaaatgggcaaaaaccagtgtctatctcttgggctgtacttaggttcaatgtggtgcctggcacatagtgtgtgctccataaatggtaattgttgccaattgttggttgtcaacctcccagaccctcccagctgagagagggatgcctctgaggggtagaagacaggatcgagcacctcccaaccatagatatccaagtggactgcctggaggaggaggaggcaagaggagagtttggaaggatgagagtttgcacatggcccagctcttttacctttggatgggggcctgtaggccaagcagagggtggcacaacttcaagataggggagagatggtgggggagagtggggggcaggaggggagagacgaggcctccactgttccatgaggaccagataccctggttgggggccctgagtcctggtataagagtatgtgtgcacgcattcatccaaatgtatgtgggacaaagagacccggtgcatctagatgatgacttcagggacgtccccaagctccagaactttctgtgtctgcacctgggcgttgtcacctggacccgccatggagacaggacatatgtgcaggaccctatggtgggcacttggctggatcagggcacattgcgggtgggagcaatgctgggtgtttggccgtggcgccgtggctgtgggcaaaatgcccccgtggttggtgtgttgactgccgtcctccccatctaacccacagggagcctggccttttaaatctgctgagatattgtctcccccacccccatgaagctggaatctggggacttgctggaccagagaggtaggggaggctgggcactttctccaacacggtgctgagaatgggccttctgtcccctccctcccagctggggtggggaaaaggaggggggtgtcttaattttcttgcccccaaagccctggatgtgggggcaagtgggccaggaggacagctgtgagccactatctgggttctcccagatcggtgtgcatgttaatcggcatgtcaggcctcagagccaccattttcccgaggatgtctgtgtggcagcgtgtgtctgcccgggtccctctccatgcctctccatgtctcccagcgtccatcactgggtgctacctgcatgtgactccacggatcatcgcacgccctgtctcttgtgtatttggtagtgggggtcggggagcgtgccaccatgcgtgtcagtgtgccggatgtagtctctgtgtcacggtggcgctgcgcacgtcaacgggtattggtgtaccggtcaccatctttgtatctgcgctttgtatctggggtgacagtgtcccagcgacatgcgtcacatctacagcagtgtttttctgggtgtctgtgcgtcacggcaaagagtgtatccgtgtgtctcacacacgtgttggcctgtccgtgtcaacttgtgtccacatacgtgtcaacgcacgtgtctccagtgtcatcaccctcatatcactgtgcctcctgagcttgtccccgtgacaatcactgtgggtctcaccccacgggcgcctctcctgggcattcccttggcctccgagcaccatgtgagatgcctgctatggcggccgggcaagcggctgggagcgggctggctgctcagtcccttcccatgaggttgagcggccgcagtggccttgctgggggccccgcccgtgcccctggcctggcgtggacagaagcccgttgtgcggcagcgaggtgcgggcgtgtgttcgggccgcccacaggcctccctctgtctgcccggcgcacattgatcttggcttctgcctgtgtccgttctagcctggccagctgggtgtccggctgtctccgtgggcctgagcccactatccccgctgcccccacagccaggcaggccctgggccccacacccctgggccacccgccatccctccgaggctctgagggcgcggatttggaaactgaggtccccccttctttccccctttctctctctctctttcctccctctctcctcccctcctcccctcctcccgctccctctctccctctctctctcctcctgccaaacgcgtcttggctccgtctgaatatctctcctcctcgatttttggctccagctctgggcgcgttcactaaaggaagaagggctagctccccaacccccccttcctcaccacctcccccctcccgaggagcccctctgagggcgggagtggcctcgtgcaggggcctgggccccctgagtgggcttggccaggggggcacaggcctggcgggtgagggaacagggtggacagggcctggcagccagagggaggcaatgggcagggtgactgagctgcccggcggggcgggcgggcagggaggggtcgggggcacggagctggggtgtctggcttctggtggggctggcaggcctctgtgaggcgcagctgtgcccagaactccaagttgcgtttgccaccactaccgatgtggctgcgccagccagggaggggaggcgggtagcgggcactgcggcgctctgcagccaatcggaagccggggttgcactggggagctctccccccactgggccccaccctgaggggagccgggggtggtggccagcagtgggcagggggcagtgcccaccaccatcgccaaggaccctgccccctcagctgaagctcagtgccagccttcctggcacagatcgggcaagagcggggatctgtctgtccccacctgaatctgtgtgagccaagctggaggaaaggacagcatggaggtgcacccgacccccctgggccttttagtccaaggcaggcaggagctagggatgggttccaaattatccaggtggttccgtccaaatatcggcttcggtcgaatcatcttggggagttgggggggggtttattccgggtccatctcacacaaagtcacacactctcactggcacatgcgggcacaaagaatcacgctgacacacactggcatgctgcacctccctcaatcaaacagacacaggcgtccccatacaaagaatcttgccctcactcacagacaccttgaggcacccggccacacccgaacacatcgatgcggcattacacactcagggacgtgcatgtgggtgcagacacacgggacacgcgcagtcacacgatcacatgccatgaagcacacagcacagacacaggctctgccaccgtcaaatgcagccccacaggcacagctagaaacacacagcacacacactcagtcataatgtcagtgcccaaaacacacacatgagcaccgatacacccgcacatgccaccaagcacacaggtacatgcacatgcatgcaataacacgctctcagacacacaaaacaccccacacactccctaacccagtgtcacccaccaggagtgatttcacccattgggaaatgtctggaaacattttttttttttagagacagactgtcatctgtagcccaggctggagcacagtggtgcgatctcggctcactgcagccctgacctcccaagctcaaacgatctacccatctcagcctcctgagtagcagggaatacaggtgcatgccaccacacctggctaatttttaaatttttttgtagagacagagtctggttatgttgcccaggctggtcttgaattcctgggctcaagcagttctcccgcttcaccctcccaagtagctgggactacagccgagcaccaccatacccagctaatttttaaatttttagtaaagatgaagtctggctttgttgcccaggctggttttgaattcctgggctcaggtgatcctcccgcctcggcctcccaaggtgctgggagccatgagccaccatgcccaacctggaatcatttttggttgtcacacttgtggagggggtgctatttagtgagtggagacccaggatgctgctcagtcccctacaatggaacccctcaaccctcgccgaccacaaagaatgatccagccccaaatgtcagtagtgccaaggttggaaaccctgccatgcatccccagatacacagtaacacacacaggcacagctaacccttgacactcattacacatgcacccacatacacagtcacacccaaacaagacgccagctgacagtgtcacacacacacactctccctcactaggacccaggcattgtcgcatatataccccatttcccctgccaaacccaggcacagtcggcgtgccatgtacacagtccagtgttaccccagcacacagggacgagagccacacccccacacatattcgcacctgggccacacctggcagtggttggaaatggtgcctgagagctgagacctgccctggtggcacctcccctctgcttgtcagccacaaccagctgtctttgcgcagcagctacagccaccccagcttctcaggatagaattgggagccccaaatccctgccctggtttgtagaagcctggggtgagacaaagcctggaaaaaccacatgcccatccctgcccaggacactcgcagtcttctagactccgtggtcgagggctccaccctcacctccttgctcctggcagccaccgagagaagggatggggacaaagctaggttctttttttttttttttttaaacagtctcactctgttgcccaggctagagtgtagtggtgcaatctcagctcactgcaaccttggcctcccaggctcaagcaattctcatgcctcagcctcccgagtagctgggattacagatgtgcactatcacacctggctaatttttgtatttttagtagagacagggtttctccatgttggccagactggtctcaaactcctggcctcaagtgatccgcccgcctcggcctcccaaagtgctgggattacaggcgtgagccactgtgcctggccaacaaagctaagttctgagactcctgtcctccgtggggctgtctcactaatcctttggcctttgactccccagttctgaccccagagaaagaagagacagcggtcagcagaatggtagaagaagataggataatagcaaaataaatgtttgtcctaaaaatcgtagcaacagctaatgtgaactgtgtgcttgctgcgttgcacccttgctaagtgccttcccagcttgtcttcttgaatcctgtgttcagcaggtactgttattaggagagtggggcctgcagagccagcttcctgggtttgactcctggctctgccactcactagctgtgtaacttcaggcaagttgcttaacctctctgggtctcaatttctgtatctaggaagcagggctgtggtaaggatctgaggagttggttcacagcacacgctttaaaactgtgcttgatgtgaaaacctgctttgattttatggatgaaaaaccaagactcagtagaggtatccagtgctagggtcaagggcggggagctctttcttcaagatcgtcaccaccctaaatcctgccgatgggacaaaattgcagcttgttctctggcctttcccaaatttcaaaatgggtctgcacacccccacgcccccatttgaaacgtgccctagtggttggcccttgaacctttcttaccactctgacctttggatcttcttccatccaaggctcagaataaaggtggatggtggtctcaccccctctgcacccctgctggccaggcttgccctcacccccgcaggtccaaacatcctctcccacaccttgctgggcacccagccggagctcaaatgctgggggtgcagccgggagcctgtgcattccttcgacaaatatttaccaagcacctcctgggtgccaggctctgttttaggccccgggggctcggcagggagcaaaatctgcaaagatgccagccccggtgggagggcagactgtgaatctgataaacaagggagtgtccagtccttgagatggcgctaggtgctgtgggaagaacagagctggccgggccctcgggagtgctgggcagctgtggttttagcagaggtgggcacggagacctcatggtgagatgatgattttgaacgctgccttgctatagctcaagtgcagcccaccaggcccctttctctctccagggggcagactggaggtcaagggtgtgtggctcagcatggcatgcccatcatttgcccagaccatgttgcctgtcatttcttcaatctgagctcatctattatccatatttgtggatatgccatacggtgcccgcccaaaatctggggacaagatggccgaggcctttcctttacagaaactggggcttgatgggcactgggtattcgcaaccctgctgctctgagctgggggatggggcaggggcagctggtggcccagagtggcacttccacctgggcccctcaatttagctcccccggggcgggctgggtttatttttaccccagcctgtcaccctggcagtaccaggctgcgccatctttgcagggtcttggggatctgcccacagcttgggggtatcaggctttgtctgttgggttccccaactcccaccagggccccagattctctccacccccaaagctccaggcttgagagctctgggctggggcccggcggggtcggcactgcaggctggcaaccaccgtgcccagcctggtggcatttggtttggcgccctgcctgcctgccacccccaccccatgcccgggcagagccgagcggctgctgctgccagtctccatttcgaagcttgaggtgggggtggggaagtgctgggcgcctccaggcccctgcttgtcccgtgccacctggggatcatcccccatgcctgttccctggaagggccgggctgcctcttccgctgcccctttgcagcctggagctcagcaaggatgcccgcctggcttccatcttcccggttcgctccctcccttcctccccctctcgcctgcttgcctgtaatggctcaccatttttggcatctcttccccctccccccccataggcgccaacctcacttccaaacccgccgccatcgttggctctctggccttctctgccgcctggggctgggacctggaaatgggaatttgggggtgggggccgggcctgtggacatcaggggctttctgcgtgctcgtgtgtatctctggggttggggggcacatgttctaagccagctcgctccatccaccccttcatttgcctcaagcttgcagagcaggactgcagcaaaagtgacgaccctcccatttctgattgccctgcacctggtattggcatctgggccaccagggggctagggtgggcatctctgcccaagcccaggccctggcatggcaagggcaaggcttcatctgtggtgtgccccaacctctccctttccctaagttccccccaaggttccaagattcctgcttccactccccagagctggagtgggggaaccaagcctcgccttcggtacttgtgtccccagatggggcaagggacttcggaggaaccggtttaatgccctcccccccaccccacacccgctgcccgcgcctctctcggcactaaacaaagtttgctaagtaacttcaaatgttatttgaggacggcctggcctcaacccaaggcggccctgtggaaacttgtttttcgctgccgaggctgcaagtatcaaagacacactttcggtgggggggtgctccaataccactcccccctctgtggcaggggctggccctgaatggacacacagacacacagagcagacacacataggcctgtgcctacagagacacagacatcatcctgtggcctaaacaccaggtacagctgcaggacagccttggagcatggtacacataatacatacaacaaacacacatgttgacaagttaaggaggtaggagggggtgacagggcactacccctcagcccatggagtcctgggattcttccagctggtggggtttcgccatgttgggaaaaacgtacggctccgatccttggggtcctgtattctcatgactccagggcttgagggggtgctgggatgaggcccccagcctcagtttccccatccacagagggacactatggacttttcagcccagcctgggttttttcatccccctggcagggctgcatccctaaaggtgagtccctaaaagtgggctctgagcacagggcctggtatacaagcaatgctccagtgtcggcaggcatttctgccagtcctgaccccataaacctggtgtgttttcatcctgattggtggccctgaccccaagcagcttggggttctccgggtcccgggaggagcccatgctgacgttactcgcttgctccaatcttcccgtctctgtgattttctcactttgttcctctctttctctcctagcttttcttgatctttccccacatccctcttcttctttctccaggtctccgctggccctgcccaggcctggagctcagggaaaacgtgggaaacaggcatagggtacgcatccctcactgaagccagccaggcctgcagtcctccatgctctgagccccctgatgaccctcctttggcccccctccaaaccccagcaagaagctggaggctgggtacttgagctgacacagtaggtgaaggagaggctctgtcacagggtcctctgagacccatcacctccaaggtttgcaaacaggtggagccccactgaatccgatggaaaagccaaggcccaagaggaaaccggagtgagttcctcctgcagttccagagagcctccccatcctcgctgtagccaggtcctcaccgaggtagatttgcgggggtctcccagtcccagtcccacacactgcctcatccccactcacagtcaacgcccgcaacaccccgccacccgcagtctgtcgcgcagtgacagcctgtcacaagcaccgccgcacaccggcacaatctgtcgtccacgcacagtctcacacacaacctgtcacacacgcacacacacacacagcggcacagtcgcacacacagccagcctcacgcgatcacaccaagcgtcacagcttgtcacagccatagattcctcacaataaaaataacagctaccgactccagagcaattatgcctgggcagcgggtgggtggggggaaggcgggcatatgtgacctcctgtgaccctcccaacacgaggcaggtatgagtaacctgttttacagatgaggaaacagaggccgcaaggtcaagtgccaaggtcatggggctagaagcagggtggtggggattacccagccagattcccaggagtgagcaagacttaaacaggttcactccagcttttcatcccccttctggccacctgaggctcctccttctggccttcccatgggaattcccttcctattccccagttctaagaagcccagagcaagaaacaggaggaagaggcttcctgattccccgcttaagggtgttcaaactgtctgcccctggctgggaaaacagggccacgccctccccaccaaatgctacttggctccaagtggggtactgatgggcactgaaaaaccgatgggcagtgagggctatcagaggggcaactacaagtacagtagcactaggcttgagtgtctgatgtgtgagtggccatgtggacggctggagttggtccgcagtggtggcagcttgtggtcctttgggggatttggtggtagaacggggccgggggtcttcaaaggcagagaagtctcaggacttcaaaccaacagcctaaccctgtccacacaggtggagtggcccaccttgggcccgggggggcctccaggagccccctggcccaggcaggccccgcctccaccgccccaggggccctccgaggtccagggcgcttcctcctctgcaacccgcttttcccttgctttccccttctttgttcctcccccgcctgctcctggggcttcccccattggagttgcctcggccaaaaccaacagggctccaacgacatcccgccttggcctgccgggcgggcggccggccctgccccatggcccgctcaggggccagatccgggctcagctgggtccggacggcggccctcgcgcacgtggttactcccaaggcgtgcgcaagcactcgcacaccccctggccctgcggccccgaaggggacctaggcgcgctcatgcacgtccctgtctgacaccccagcccggcaactcggacgtgcgcacgcacataagcacgctctcgtatagttgctcccacctgggtccgcagcatgcccttgcccggcgcccccagtcgggatctcaggcaccgaaagcttatatgcgcacctaggcctgacatcccaacgacactggctggcgcacttacacctataacatgcccctatcgggcaccacatgggggtccctaacacaagcattcactcccctgctttccctccgatggagctttcgagcacaggtactcgagccctgcgccccaacggggagctccaggtgggtccgtgagcccgctctggtgcccacacacatggctccaggcccacgcgggtacacacctccccagcctgcacacgcgtgtttcacatgagtcacacacctgccaggccgctcagggcatctggcttcaaagcggcattcaggttgttgcgggagccggcagggaagggaggcctaattccacctcccccatccctctcggaacacccgcctccccatatgtccctggggcacaggtgggacatcccagaactgccgctgcccagtggcgcccctgcatgtgctatatttatatttgaaatttgtacctttatatatactttttatatgtaagaaccgctcccccctcttcccgctccacgtttgtacttggattttaccacccccactaggcttcgacccaaacctgcaaaaaccatttcgccaggcagggatgtagggggaggcgggagcagccctccccctctccactgcggacggacatcccacgttcttaaagaccggggaccccccctcccccaagggccggactgcagctccgaatcccgcagccccagaaacacaatcgcgggggtgggtgctggcggcgagacgttgctttttggtgtgtgtttgctgttaccgcttaaattaaccctgagtgacggcttgcaattcgccacaaagaggccatttaatgccccccaccaccccacctcgggagaaatttccacttgcccccgagtccagctcgggccgcacgctacccgccctccaggccttcgctccaggtgcgcccgggcggtggaggcgagttccctgcgcgcatcatggacttcaggagtgagggtgggtgggttttggaggggtgggagcagaggcaggggggtgtgccgggactccccagacgctccactgcccaatcatagctctttgatatcccagcccggctggagaaagttagatggtactccagcgtctcctccgggtccccggaagagagaagctgggctgcaccccatgttggcacgaacactccctccccagtgcctctgtgcattaggtcgcgtgcctgtacgtaccctacctgagaccgcccctccgccaagtgcgcccctcgacaggtgcccgtcgcccacaggctcctttcattgtagcctccctggaggttctcaaggcgcctggcatttcctggacccgctgcaactgactcaagactggggggagggggctcatggaggtagaggtggtggggaggtctccccagggcccaggcaggaggagggaaggtcgtgtgctttccatgtcgcgggcaaaatgggtgctgacggtcactgtcacttgcatcgcacactgaggggtgggagaggacagcacatgcctggaccgtgcaggaggcccagaaccggggcgcgaaggggccgcgggacacgagcgggccgtgcgcaaagcctggcgcgcgcgtgcgcagcgacgaaaaggcgggaagcggcgcttcgaggccccggatgtcagacgcgacctgtgtggcatgtaccaggctggctccgacgacggaaccgccatgggtgctgagtggagagtggggaccgcggaccccgggggcaggtgaggggaaactgggagcataggtctggctttcgaccgtttgtgccgccagagtcttctcaatgatccctcccaggcaccgtaggccctctagtgggtctgggtggcgtcctcccggcccctcgctgctcaagcgcggctccctcttgccggggcgcggcctgcccctcacagtgacccccccgacccaccccccaaaaagtgaccccgcgctggtgggcatggaggactgtcccagttcaccatttgctgcgtcaaaggccgccgccaaaaggggctccgatgtcggcatttttgccttaaggctagtttgtcccccaggcgcgcgggggttgggggttcagggccgcctgtgcctcagtttctctcctcctgcgcccatcctgacatccgacggaggataatgcgcgttggagggctttggccgtgaatgcgatgttgatgattgctgtgattctttgggtgcttgggagagtttggggtttaactgcccccaaatccgaggacagcttgggggcgtcccttcggagaggatctctccgcgtcgcatagtgagcgtcgtcatctctagactaccccggtttccgaggagcctcaccttcaatccccgagccttctcttttgggggagtaaaggcggggaaatttaccaggggagatttttgtttccagggttggctgggtttgggggattttgtcctccagcgagcgcggggaagaaatgtgactaagtggcagaaaatgcgctttccctttctctctcttctgccttcgggccgcggggagttgcgcagactctaaaaaaaaaacctttaaaaacccaaaacctcccctccaagtccctttcgatctacgccaccttccctctcagggctgatttcttgaatttggggcgtcgaggcctccccacccgttgctaccagcccttttgcagcacttcctgggcaggccaggggagaggacggaaaagtgaaaaaagaacgtgtgcgcccagcggacccgacttaacctgttggtggaggaggaagctggcgtcgggctgaagtcccccgagccacccctggagccagagcagcccccgagcattcagagaaagccgcccgtccccagtcccctcggaagccggtcataaacccgacttctcatcacccgaattacttaaatgagctttgatggtgttaggtccttttccacgtgcggatgactcagcccgctgcagctgcgcccggggaggtgaccctggggcagcggctgaccctgctgcgccctgtaccctggacccagacgcggcccatcccagcagcaccccccgccccaagctcccagaccacacttagctttttttttccccccttactcttcgagtctttttcctcttctctaaaaacattttttttaatttaaaggagttttattacttcttttttttttataaagcatgtgagacagaggctgaatggtagaaacaggctgttaaaaaaagaaaaatacgtgccggtgacgcttcgtggagctggcgagcctcgcctgtcccgcgactgagcttgcggtcgccccgattctctagtagaccctggcgtggggcacctgagatctccgccactgaaaaggcgctatagaaatgcaaggaattatgattttaataaaattgtctcatttaggagcgagcttctgcgctgcctctgtcgtcggagcccgggtttgccacggcaaagtctgtaatcagagaaaaataccagctttgttgagggttagaatatatcattggctaatgtgtgtggttttctttttaaataatgctaagcattggaataattaaagagtgagaaataactcgtctctcctctctcctctccattcagcattgtcttatttaagggcggaaagcgcgcttttcggcagagctggttagtttttaatgcgggctttttttttctcacccgccgttccctccgctccggtctgattcgcaaatccccaaactggcacaaaccgggaaacttgcggccggccgttcttctccccgagttggagacagccctctcctcttccctcccccgcctctgggccctgacccactgcctggtttgcgctagagccgtttaaaaaagaaagaaaggaagaaaggagccgggctctggtaccccgatgccagccgagggcgcgtttcccaggcggcgggctggtgggagagtcaaacccgggtgtggggaagcagcttcgctgcctactctgcatcctctcccctaaaaagaatcaagtatttctagagatcgcctgctcagagggctcagatcccttgtcatattttaaattaaattgaacagttctttctttccagccccatatgcaataggaagagaaaatgcagtcttggagagcccgtcttggcaaccctgtgcccttgatagaagagagagctgcccacttgggctgggcctggcatccagccccagaggagtgctcttgccactggccacagggcctggatttggggaggaagagcagggtccagggccagtggctgagcacggcctggagagatgtgggagttggggaaaggactttttatcagggctgcagaggttcggctctgggctggtggtagggggctggtggtaggcgaggtggctgcggtggcccttccgccaggtgtggggtagaccgcttagaagggaaaggggatcctgaagtgcctgaggaagaaacagcaatgagaaagcaatgggaaaaatgggcaataaatgggcataggggttagtgcccacaggcgctagtggctgtgaagtgcctttgaggtgcaaagggagctttttatgtatttgcttcaggtgtttttcattacatgtgtttcccttttattttccttgttatttggtccttagacttttcagcgatcccttgtattcgtctttttacataagcagaaacttttttttttcctccttagagagatactgtgggaggtattttgccttcagtgctttctctttcctgctttttttaaaatttaattttaaaattataaagtaaatttagtgctagtgaaagtgaggggggaaccagctggggctggagccagggaaggggtaggcagaggcagggttctgcctcccttcctgaggcagccccgccccaggaccctaggcccagcctggtgtcgcttgctcactctctctgctctcttctcttgatgccattctactcccctcaccttcctgcagggttcttgtggacagggatggggacagtgtatcccagtgggtgcccattctccctttgggaacccctggctctgcagagtcattttccttcatgacctacatactgaggccccccattccctgcctgccaggcaagcagggcgagaggaggggcccttgctcccctcagacactaaggctgtttggctttcagctcggcgggtcctgtttgtcccccatacatgccctgttagtctgctaaacccgctgcacagttggttgccctgttgatgggatcagagttgggcaggcatagagagatcacacacacacacacacacacacgcacacgcacacgcactctgcagcagtgaggatgagaggggtttctatttgccacacatttttgtggtcacatgaatagcacactctgctctataacacgtgtatgcacataggtgtttgcatttgatgatactggtgtgacaaggaggtatttctaagccatataaattatgagaactgtatagcttaaaaatttaaggcttgttcagcggtgctgaaaatgtttatttcttaatctgggtggggttacatgggtgtgttcactttgtgaaagtgtatcaagcggcctaacttacagtgtgtgcactttttatacctgccttgcttcagttaaaaagtttacttaaaaaaagaagccccactctcaaaggtaaagaaaaacctgtgcattacaaaatataataaaaatttaaataaaaatttcctccagcctgctttgcttagtccttcctgctaggaatggtgggagggcttgtaaaaaatagcgggctgatataaaagctagcaggcatgtggtccacgaggcatcctgacccgtccacatgtgtggagtgcctgaaaactgcctacagacaggtatagaggtaggattttaacatctcagggctaaaggataagaaatggtgaggagtaagttacttgccaattacattttgctgtcaacatctggaaagcaaaattgcagctgttctctctgcccctgccccccgcccccgcattgccacctcttcttttttttctgcacacttacattttttgtacgcttgccatttatacttcggttttctgcactgttaaaacaattccatggctctgttcaaattgggttgttgggtttgagttttttttttttttttaatggatcttgtagtctgacagtataatttttggagggatttatttaaacaggcccaggagccattgataatcccctcccttttctttcgccctctctgtcttcccagaactgctcaggccagcaatgagggggaggacgctcggcagcccttgccgggctccttcctttagcctctgctcctccgggcaggtactgacagcttcgccctccatggcccttctgtggtgtttttgttttctcttcgccccccaaaaatatttgaaccaaaaagcctcttttttttttcctccacccacagcaaactgaaaggactagtgaaccgtgattcaacagagcgagggcgcctcttttcttccttagcattaattaactcaagttcgttaggacgttgggtctgtcgcccacagttttctcttgtgtgtgctgaatcgggtcatagagggagacttcccgtgcaaacagtttgtgttggagctgaaggacgcagagggggagagagggtgagaaagaaagggagccggggagggacggagcgtggccgaggggtgggcatggtccgagctcctcaaagcacccccggtgtcattctctgcaggggctagacaccagggaaatgtggattcttgggtttcctgggcaatgatcctgataataaaatagttgcgggagcaatacattttgaggaattgaaaaatgacctctttctaactcctaaaattgtacattttggggttctggccactgcctgtggctgaagcaattgcaagaaagaggttccctcaggaccgaggggtgccaggccgatctgagggcaggtggtgaggagaaatccttccttgctccttgtctctcctgtggcgggggaaacagaactggtaaaaaatgaaggggggtgtctggactgatcctgatggagctcttgcagagggactgggaagacctctgccttttgggttttgtcaccttgccctgacccctccgaaggaggggatttgctgtggtgcctggggtgagttttcagcattttgccatttgctctggccttctctctcgacttccagatattttcacagtgtgctgggcacagacctcatcttcacgcgctggtctctctttgccttgccttttgtcactttttcagttcttcttcagaaagagttatgaagctggcctgtgcagttcttccctcttcccgggcccttggccaccatgaagtgacacttcccaagccggttaggtgtgtgaggctctgcacttcccttgcccccggaagcccttccctgtcatctgtccttcacgcacttcggaaggtttcatccccatgcagcctgccggctggagaagagagctttggccttcctggcttttacttctgtttggtgacacaaggaagtttcaagctaaataatgaattaaagagtaggatttttgtttcccattccttgtagaggatgagatgaaagtaaacaatttccagttgccttagagagaatagattgtctcccctaatatccccattcctaccctatattattctgtgccaagagggtaagggagatgtgcctggagcagaggagcatttggagccagaacgaggctgcctgttggcccgatcccaggccaccgctcctggtttgtagtctggaggagaaaaggaaggggcggggggggggggggggcgcggtttacaggagagaagtgtgcggcctggctgtgaggcagaccctgtcctagacccagcactggggtgtggggcgaatccattcagccagcatgaggacactggaaagaaactgcgcagagccgcctttcctgagcagaggaaaacaggcccaagtcagccaaaaacccgctttgtccaaattatccgagctccctcgcaaagtgcattttccggtttccattcctggagtttccagacttttggatgattttgttctgactacagagccccttctcgttggcccccaactgaggggaggccccaccctcctctaggataagcagcagggccccttccctggctgcccagtgctgccgctgcgtcatgtctgcagttcccttcccatctctggccgctgtctggccactgtcttcttgtggccttccacgaagcagcagtaatcttgggacaaggtgggagagctcagggttacgaagccggcttcttttggttcagaccaaggctgaattataaaattccaacaattgggcaaactaattggggccctgtttatggcctttttaatttcccatgtcctttcatacccaggctgcagatatgctttattaaaatggatactggaatatctggtcatttctgtgaagttttgtaagttatttgctctaattgcctgtagttacccagatcaacatgggcccaagtgtccaggatctgaaagaataaatctgggccttaaagccagcaggatgtggacacataggatttttttttttttaagataaagaaggctactaaaagtggccctgtcttaaaatatacaacttcttatgcttctagatgtttcactataggtaggtgcgggcaggttgcaaaacctatctcagtctgggaagattattttgtttccttgaagaatttttaacactgtatatgtgagtgaggtgctgtacatattttcctatttttcttcaaataatccatacaggctcagtggacaggtctgttgtgtagagtttttgaaaaccatgcatttcttctcatggagaagcagtcattttccttaactggtttttctttctctgccgcggtgcagagcccttttctgtcttcttatttttcttcctctgctgttctgtttccctccatctttgtccttctttcttttcagttgtgggcctagcttggcactctctctccaggtttggcttttttctcttttttcgttctccttctctctatttctctttctccgtggccctttcagtctttttctgttgggggtacatttctcctagtgatggctgaaactggcatgggtatgtattttagaaatgtttcagtgaaaactgttgctggttttttttttgtttgtttgttttttttttttttttaccaaatagtactcaacaataaaagacagaggcttttcttccataatggcagcaaaatccctttccacaaaccaaaaacccatatgaatttttaaaaagtcttatttctggcttctcgatgatttttctctccaatgggggaaatacctttcccccacaatgtttcctgcttttccttttttccccccttgtcttttttttttctcttcctattaccagcatcagtggcttcctttccccatttcccatgtccttctactctgtggcctgcatgtccccttgctctttccatcacctgaactcttacacttgccagtgactcagacctggagaagccttgaatcgtatgagggattttttgtcttgattctggtctttggtgcaggatgtaaagcggtctgatctcctgcctggggctggaggggagaagagaaggaggctgggctgggaacaggtaatcttccaacaggagcctccactctttaacaaaagggggacagtttccttttgtctagggctcatgaggggcgtgtctgggctgatggccgccaccagtggcatgcaggaggagggggcccgcagtgaagggtgcttgaaatgtttctaatggaacccgagcaattcctctgtgtgcgcccaaaataggaggggaggaagggagggagggaggaaagagaaatagagaaagagaccttctcatctcccgaagcatcagaatatcctggccactcctccagaaaggcctcctccactgggagccagcagcccatagagagaatggggtgaggggaaagtatttgcctgagaatcttctgcccacctgcaaggttatagccactggcaggagaaggacaattgacaattgttcttcctccaactttctgccctgggaaaggcctgttgcttcttctgttaagagagccttgagggggtgcttggggctctttgtaggtccctgaggctctattgagacactcttctgccgcctctcctctgatctctccgccagtccgtggagttttgacccccaacccctctccaggagccagtcgtgcatcttgtcctgtttccctaacttctacatggatccttccatctgtcatttcccagctgtgggactgttgctgcccccacctctatccctgacccagttgtaccaccagattcagattcaacccatgtcgagcatgtctcttctactgtggcactgtggtctgtgaagtggaacatgccaggattctccaggaggctcgtgttggccattttctgtttggtgtctaatatttagtataaatcagaatacaagaaaaacacctccatgccaaatataaactcacttgtagtttttaatgacctcatcttgactttagaaggtaaaattgtttccacaaggtggagaggcaggatttggtaccttatgtcatgtctctgagctaacatctttggctgattggactgaagctggttattaacatgatgtgaattattggacaccaccctaagaggcctgtctctgataccacctgccttctgtactctcacctctaaccgtttctttcagggatcagccatgagctcagttcacttgagatggataattcagggcacagactggggtcccaggtgttgggcagcccctctcccattgtcagggttcagcgccagcccagggctggatgttttattttggcatgccccaggtgctcttccgggaacctttctgccaacataaaggccacaaagcacagggtttcagttggggaagaaaggggcacgagtgagcagtgaccttttttccgtcgccagctgaggactgagcctcgctgagggagagggcggctgtagggatggggttctgagtggaattggatccctttctccctgtctgcagccacatccttcttcctctgcttttccttttatgtcatatctatttccttcttactgtgtttcgaaggcctcaagcatggctgctccatagctctaactggagagaccccctcagaagtgggactcccctacccagtgctcaccctttctgcttgctgtgaggaaggtccccaagtggaggaccagagcaggggctccccggtgggtcacttctctgtgacttgatttcccccaggtggcctgtttttgatagagccctttgctgttttttgttgtgtcctttcttagctcttttcttttcatttgggtttctcattttatacttttgcactttgcactgctagggtttgggctctttagtctaaattgatttgggagacaggtaagaaaactaatctcaggtcaactggagagggcagatctggagaattaaatgcctgtgcagtggtgaggggcgttggtcagattccttgcctctgctcagaggtagtgtccatctttttgcctttgtcacttctccccgggtctggctgttgtttgtggctgcgtgtagagcttgtcaggcggagtgctgtgacaggaggctattttaataaactgttgcagtttctcgagccgagctgtgttgcgttggcatccctcgtcaccgctaatggagtgtgcgtggctgggtgtgggccgaaggaggaggctgagcttgctgggggctgggggagaagggagggacgtgtggggtgctggcctcccccttgtctgagagtgctccttcagcagccagacctgggggcatcacaaggtggcagtaccctgggcaccagatccctgccctggaagtactgctggcatggacactttctgagctctctttcttcttatttctattcatagcaccgcaggcccgtgtgtatgtggccggggaggaaaacttccactcgcccctgtgtgctccataggaagaaaaaaaaaaagaaagaaagaaatagaaacagaaaaagagagtgtgcaggcccgagagaaagactgaaaccaaaacacagagagaaggcgcagctgcttccccaaggccttctggggctcccgcccgccagcccgccgggagtcaggcctttatttatttatttttcaggcttaaaaaaaaatttcgagtcttccacaatcccagtcccccccaatgccccaccccacccccagatttgctgggtggctgctgccaaatggacccgagtgggagcctggaatgaaaaattcataactgctggactttgcttgttcattagacgtgaacttgtcgattgggcaaattgtttttggtctccaactgccgggggctctccccaccctccctgctcgcccggttccctcctccccttggacgcagccattggctgctcgtggatgtctctttgccaaataggtggatccttctctctctttctctctctctctctctctctctctctgtctctttctccccccacccctttttactggcttggcacaagcaaatggatggggattgagcctgaaaggagagagagagagggagtttgagagagagaaaaggagcaaaaaaaaaaaacaccccaaaaacccaaccagtgcgcacacacacgcgcacactcacacacacgccccatcccatccacgtcctccctcgatcctcgatctctccctcccccccttcttcctttcctccctccctcgctccctctctctcttttgcacgcgtctgccagcaacggtctgcagccggtcagaactcgtcctcttccccgggaatctgcgagctcccccttttcctccgatcaggcagctcgaagtttacacccctgtgccgctgccaaagccgaaagcctttttcttcagctgccgctttttccctcctgggttttgtttttgtttttgttttgcacgggggtggggtggggtgcgttgttggttgtggggagatggtgggaggctggttttgatttttaaattttgcatttttttctttttttttttttttaaactggaagaggatgcacaggggaagaaattgaaaaaaaaattttgttggcttttgtttacctggcgtgtgtggcagccggctcgctccctctctctgcttgctatccctgacctttctttctttttgctccttttcaaaaaaaatattaatttcccccttctgtgcaatggagcatggggggggggaggagggggaagggtttgagaatccacccaagcccggcccctattccccagaacaccaataataaccccctttaaaacatttaccttcctcccctgctcctcctcctcccccctccccccacccgcccccaactcacaactcttttgagtccagaatctcagaatcgggcgttgggctttgccgggtgcttcagatcaatggtaattatttaattttttccagttttatttttgtaaacagaaatcaattattatttaaacttcaaacaagcaaacaaccaaaaaaaaaaaaaaaaaccaaacaaaaccgagagagcccatccttctgtcacctgactgagtgggaaaaagggtgaaggggttgtgggaggctggggaaggggtcgcaagaagacccatgtagcttttaaccctaatgtggccgagacaagcaccttatttgtgctaacaagaagtgttttgttcattattactgtgattaacattagtattggtgtcgataacaaagctgaaatcacatatttaggatttaggtctgattaaaaaatgttggggtggatgttccaactggatcaggagaaaagaaaatgaaaacagcctggggagagggaagcctgatctgtttcctcactcgcttgctcgtggatgtcattttctgtcttcttgggggcggccaaaaatcgaccggtgtcggggaccagaggcggccccgcacgcccccgcgtgtgcgtccacgggcgtctgtgcagacggacactgtgccggggcgagctgacaggagttcacggctgcgatagaacatggagatgtcatgggcgcgacagagcctggcggggataccagcagcgtgtgtgtgtggacggcaacgttgtctgtgcgcgtgtgtgtgagtgagtgagggagagagagagagaataggtgtgtgtagaggctcccggtgcctctgtctggctgctgaggctgagatgggagcaagtggctggcgaagctggtggtggcttcaaaccacactttcgtagaacaatcgcaagagaaaattgttggggggagggaggaggaggagaaggcggttttccttgtgcccccccttctaacgctgcttttctccttctctctttccccctcatcccgtcttcccctcctcccgtcctccctcgccccgcatgctcccggcttgccgcctgcaggatgagttccacccgttcatcgaggcactgctgcctcacgtccgcgctttctcctacacctggttcaacctgcaggcgcggaagcgcaagtacttcaagaagcatgaaaagcggatgtcgaaggacgaggagcgggcggtgaaggacgagctgctgggcgagaagcccgagatcaagcagaagtgggcatcccggctgctggccaagctgcgcaaggacatccggcccgagttccgcgaggacttcgtgctgaccatcacgggcaagaagcccccctgctgcgtgctctccaaccccgaccagaagggcaagatccggcggattgactgcctgcgccaggctgacaaggtgtggcggctggacctggtcatggtgattttgtttaaggggatccccctggaaagtactgatggggagcggctctacaagtcgcctcagtgctcgaaccccggcctgtgcgtccagccacatcacattggagtcacaatcaaagaactggatctttatctggcttactttgtccacactccgggtaggtcgttctcaaccatttttccctctcattttattttccttgctggcatttgttctgtttattgttcctctaatttccaagcgataactcgccatgggcctaactggtgtatgcccgtcctgcggggcctgcaacacggttctatgggcccttttcctttttcctgtcttctgtctcccccgacctgttctattcttcctcctctgccccctggccatggtatcgactttgtgcatctccatctttggaggacttatctgatcagaaagatgctgcaggtcttaggattggggacatgatgcccccagaattatccatgatggtgagagtttgagatgaacaacaacagcaaaccagtaattgctcttattaaaatgagtcagaagaagtattgaggggcaggtgctagttttactgcagcttcacctccagtcccaggaaaaactgggtttggtacaagcgggatgggcaggagtccggtggagagaaggggcatgtgaaaccctgggatatgagactgaatgaacagaaaagaggagagaagacagtagtgggcagattctgtggcctaaatactcaggcgggagctgttttggctgggatttggctgtcagtatgaaagtaatttgatttcatagagagtgaaaacaaggacgagattccttgagctctttcccttctccttatttcagctaaagtggcaaggcctcaggatggatgcccacagccctggcactggggagcagagaggctttctcggggcacaggcatggcagggagcagcgttgctgtggaagaggtcttaaacaagcaaacaaacaaaccaaaaaaaaaaaaaactctgtaaaatctccttttccttttgtgttccaagtagttctgcttctcttcgcttttccagttttaccctgcattttgggtcagggtggtttagttctcctcctctgttccttttttcccttaccctttccctttttataatttctttccgcttttgttttcttacaaattgaaacagagatggctggttaatttttagcctccactcagctacgcccaatttactgccgcctttgaaacctaaacgggcggcactctgtgattaagcaaggcagaagtgtgtttacattatgcccaaccaacttgtaatgagagggctaccaaacctttctctctctctctctctctctgtgtgtgtgtgtgtgtgtgtgtgtttcctttccaccattccagtattttttccccttcattttccttcttcctctctttatgcgaatttgagagaatgtggcttaacttcaactctcgcaaaggttgtttctccgcgagtgtgtgtctctgtgtctttcttcctgttcattcacaaaaaagaaaagtgattcacaatggctgtggtcacccccttgcctgtttgggaagttgggaggaatgatataactggatccagaaataaaattcgggtttgggggtgctttcagcactgcgtcaggaatgtaatctagactagagtgagccctgagtttacatgttggagaactgtggagaggagaaggtggtattggaattcttgtcctgagaggttgctttggtaactggttagaagcaggggacaccactctcaccccccaagtctctacctacttctgtggatctttctaggcctgcatccggccctgtgtgaccatcgtgacccgtcatgcagaagggccaggtgccagtcattccccctcccttcagcttgaattttttcttttgtcttttttctttttggaaaacagactgagagggaaaaaaaagttatcccctcattctctgtctatacagcaagccagatttgggagggtgtgtgcctggtagtattggaggtgactggtggcttgcagaaggctcggagcctcgagcttaccagtgtggccatcagatactcctgcacaaggggattctgcaccttccaattttagaaccaggggctcgagagcatctaagatgaaaatcaacactcatcttcctctgagctggcttcctccaaccccgctctctgactggatccttgtagctgagttgtttccctggcctcttttattttaggccgaattcttgactgctgccagtgtggggctaaggtaggatgaaaagtatgtgaggaagcagaccgtttcctggccagaagaaaggccccaccatgcctccctgccagcttaagagatcattcgcccaggaatatgagtgaattcataccccattccatgtagccgaggccacttctctgggctggggctgaggccgagtctcctctacaaaagcagagtagggaactaagggtgtattttatatcattcaggccccagactccagataatttcagtgaaggtaggatttttctcactggaattgctttagtttgagtgtgccttcctgaagtgagttgaggcgagttggcgcagcccgggccaccagtgggctgcatcacttgttcctctttggagttgggttgggtggtcttgagatggcacagaccaggcatggcttgcttcctccttgagctggcaagaaataaaaacatttcttgctttgctagaaaatgtcttctgtggctgagccaccaaagagcatcgatctgtgggcaccactttctccatgcccatgcctgccaggcacactcagcagagctgccacttgctccttccttccaggatgataaactggggacaggggccgggatggcacaggctcagacaagagctgctttggactctgaaataagtgtttttccttttcttaagacagggctgaagagccagatctgggctgagctgggggtcctgggtttcatgacagtaacggtgatgtggtggtaaatgtgggggtgtggctttgctcccaggtgccattgtcacccatggccttcctgagcccttgttatgtcccagatgaagcttcaagagatgacatgttcgagagggaataaaggacgtgtgtttggcgttgaaactccactcccagaatactgggtccaaatacagaatactaggtccaaaaggctgccatgcggctggccttcctgctgggaaggagtctgtctgtgtgtctgtctgtgtttaggaagggaggttgaggcagggcagggtcagagagcactgccgtggggaggagggtatccatttcctggtgatatccttccattcaaagcgggtatcccagaacaggtggccagggacgggtgagctggggagggccaggagagagatctctgcttgtgtgagaaaggatggccgagctggcctagaaccgctgctagactatctccaaagtttctgcagcaccctgaaggtgaaccagtgccttcagaccttccctgacacctaagccttggtcctaggaaagaaaaaaaaaaatccaaagctaacaaaatacttgagcgaatggaactgtcagcgtcaccctgtcagatccctcctgtgcgcctgcagcggaatccccacgaagtccaggtatttgagtggtggctcttttctttatctaaactctttaatgatggagagcttcccacatagaaagaactcctgtgtacccaccactagtgccagcaatcgccagatcacggccaatctcaattcaaccatcctcccaactgcccacccatgctgagttatttagaagatccaggcattatagcttttcatctgtaaatgtttttgtgcacatctctaaagatacggactcttgaaaaaccaaaccacaataccactattatacccattaaaaattcagcatttttttttagtatcatcagatactggttaatgttcacatttccctaattatcacttaattttttgtttatagtttgtttgaatcaggatccagatggggtcagtcctgcattgcgatgggttgatcagtctcaaaagactcatcataatctctaggtagtccttctcctcttcctcttccttagtcttggtttcttttctggcagttgtcattgttgttgtcgttgaaggaaacaggttgtttgtcctgtggggtttcctcagctggactctgcaggctgcgctgccccgagtgattcagtgagtgtggtgctctgagagcagattcggcctcccctccctccctaccttcaggtcccgggacagctgagcttagccttacctgtcgcaggaaatgggttagcacctgaagatttgtctaagtgaactttttcacctgtggggttgccttctcaggtatgagagcttcttggtttcggcactctagtttagggtttggggctttgtagcaggcactagttttcaggtctgagggagggctgcccatccacgtccttccttggcggtggagggcattgttcagctgtgtccatactgccaagacggggctggtgccagcgaggttccccaagcctttgctggatgcccaacccgactgttggctctggggtgagtatgtgggagggtccacaggagcacccgccgctttctccaggtccacccccaccatggaccctgtgccgcctcatccattgcctcctttttcaaggcccagaaatgccactggtctgcgtctttgaggcagcgccatctggtgccagggctgacaaagatcgcagggccctggaactgacgcctaaaattagcaggatctacagattatcttttaacccaatgtagggtcccctttagaacatcccagaagaggtgtcactgtcattcaaaggtcagctttggttgtaaaattcttccattcttccatgtctagcttgtaggatggttccagggattaaaccagctaatatgtaaagataccggcacatagcaggacggcagctgctgtgattgaggacaattgttatgatttagggagcccaaggctgactctctgtcacctttacttgttggtcttttttttctcttaagggatgacccaggtgaaagctgattttcctgtaacaggacagcatttgaaataccaaaggcagctcttatgtctcccttccacccttctccccaggaagctgtctcctctccagcctgaatatcaccagtccctaatgcctcccacatttcacatggctcctagtgcccttgccattttggtaaccacctcctggaagccctctggtttgttttggtccctctgattcataaaatttctgaaactggagtgttcagaattgaacacagaaactccaagcatgatcagatcctagccagccatggtggctacataattttcagggccttccagctacatactgtgcagggctcagtgcaaaatgaaaatgtggggctccttgttcaaaatttttaggaattacagcacgacatcagttagagcatttaaccaagcgtggggggcacgcaagttgcacacccgtgaagctggccctggccacctttgttttggacattcgtgtctgttaatacaacttggggtgctgggtctgggtgatgtggaataatgatggggctcaggctggcctcagagcggggcatgaccccaaagaggagaacagaaatgcccagacccaatccttatgcttgggcttggtcttattctcagactcctttgaccacctgctcttgtcccttttgttcatagtgctgtccacccaaccagtcaagagctcccattgcctacaacatgcagggggtttctcagtagagtgcttgctctgctggctgaattggaggctatgacatgggggaaaaaagagtcacctttgtcggagcttgagccagcaaagcgccgaccgtgaacaagccagaggggacctagaggcctgatcccataattatgggcatggtgaccagccgtgctctattgctgacccagaggaaacagggctactctgcagcagaagggctggggtccagacgtgcagaaggacttcctgagaacttggtttactttttggcgcttccaaagcatggtagaattccctttatccatgaaatgcacacttagtcaacttactgtgagcaaggtcctggcctaggggttcctagatctctaagaataagagaatcttgcgtgtacctggcaggctttgggtaaaggcccgatgatatcttctagaaggcttcctcccgtaggcgtaggcgtgaacctgcagtgacccatgctggaggggagggaaagcccaaagggccttatttgggggatagctcacagtgggctgtgaattgggaggcaaggtccttcttggccaccctctagtgttacagagacctgggatgccagaggaagagtgggttagaaggggtaatgaggccagtgctacgttctccctctgtcctggcttcctgtagcagctgggcagagaggggacagctgagtgtccccttttctgcctagggaagaaggtgactccctccccacccctttttctctttgccctgtccgtcccatccctccacccccgcccttctgtctcaggagctgccacgcttcagttattttatccttcagtgtccgattcagaagtcttttcaaaggccccagccgtgtcagcgcggtgctcgcacaaaaggcctctttgatttcttgtttgttttcatttgccagtggagggggaggggggcaggagagaaagagcttctgggttttaaaatttttatttgggttgcttcattctcagaggagttggctccctggaactcctttctgagttgggggctcagagttgaacggcagccttctgaagagagggctagtgtaggagtggagggttgggtggagctcccagggtgacaggaggaggtgtaggggtttaaatatagttattgattcatcctacaaacactttgggcagatcttatgtgctaggcctaagggcagccctgcctgttgggtagaggaaaggtctgaggtgtctggcacatgacattcccctgtgtgttgcatcgttcgaggactcctcacagctgtggatttgcacagttgtgaactttgactttgttatttttccttttttgtcccagattccgcctttgaagggattctactagcatacacacttcttggagactcagtacttcagaatacaggttggggcttcccaccctaaatcagagaatgagggagagggagtgagaggtttatagagcagctaggtgtcttcctgggaatggtgtgcagaggacctgggcccacagcttgttttggactttgagggcaggtcagtgctgctgagaccttggtgagtagggagttgaggccaaaaagaaatggaaggccatgtttgtccaaggtttcgaacaagagacacccaaaccagtgcctgttggggtgcgtaccttaacacatgtgggcacgtccctatatcccagtaagaagaggtgcagcctgctggtttacatgcctgtatggaggcctaattgtcagggcttgggaagagagtgccacagaccgagactcaggcaggtggtcacgggcatcagcaacagggaagtgtgcccattgggtgagggggggctcacagggcctggttggcagacgggaggaggaggctggggggctgagagatagataaatatagctgatggcatttctgatgataggtttttcttggcaccaagggcaccgtggaaaacagcacgacaaacgcccggccctgcaggccgccgtcgccattttaagcatgtttgagtttaagggttgttggcgttagaatagggtcccaggaggaggagggcctagggaggagaagtttggctggactggaccttaccccccaggtgcctgggtcccttactttgtctataatggatatctcgtaccttatttcctggccctttggggatttaaaaaatattctggggctgccctttatgggtctgtctcccaagtgacttatttcaccaccagctgccatggactatcagtagggggcatcttggctcttctctcactcctgatgccttactgatgacatggcatgccaccaccaccccagtacagggtacttattagctgttatttggggacacccaataacttaaggggcacctgtttgtccaggctcctaacaacttcttgtcccctgtgggcatgcccttggtctctatcccctgctttaattccatttttccattgaaggccctctatggctttagcaccaggctaagtcctctctatgtattaattccctgaattctcaccctgattctagttttaagcctgtgctcctggctgggtgtgtgtgcactcaggtgatgtgcataatatgtgtagtgaggaatcagcaaaccagacctggggaccagggaggcttcctagaagacgacctacttgacctgcaccttgaaagacagtgaggaattagctcgttttgtcagctgcctgagccttctcagtgtgcctggagctgattccctcctcacaatggttgagtgatatagacagggcaggtattattgtatctactgtacagaggaggacccgaagtacagagatgacaggggactctggtcacatgatgagtttctggcagaaggggccggcttctaggtcactgagtacctggagctcattctgagggcatcgctgctccttgaacttcatcaggattactggctttggcagagtctcagaggagaaaacctcaagggtccctgttggagccagtttcatcattgtggtctctgtcactctctagaagagagcccagcttgcggctcagctcaagggctcccccagtggctgagtatgtggggtggaaacagagaatgggcacctggccctgtcctgacactggcctccctccctcctgacaggccatggctccctggatccctgccaccaacctcgagaggcagcatgctagcatagacgggctgagtctagcatagacaggggccaggttggctggatgctctcaccctgctgcagccagctctgcttcttttcatatctccctggagcatgggggagggatcccacctgaccttctcaggtagaggaggcaggaagtctaggtgtgaggccaggcaggttctgctagaccttgggattcctgatccttgcactgtcacacccttttcctgggagtgtccttggaatcagtttgaaataaaaatgaatgtaattatcataattaaccaggtgatcgctggaagttttacaataatctgctactcattgcctttttcacttcttcacattgactctcacctttatccctttcttaaagttggaaaactctcggggtgtgtatataaaaactctcctagcatgactaaggctgggttcagggagaggctggctcaccgctctagattttcgtctgtgtccatgataattagacagaggcttacctctcaccattgatatcagctccccttgagcagcatttcccaactgcggaactgttgacattcgagtgagatcattctgtgtcttgggggactgtcttggacattgtagagttttagcggaatctctggccttgacccgctagaaatcagttgcacctccctccccaaggtgtgacaaccaaaaatatctccagacatttctaagagttccctgggaacagaatcatgcatggctgagaacctctggcctggaagaaacagggattcagacagaatgccacctgtgttcacctcttgcctcaccgccagtttaggtcctcatttaccttgtgttgaatgtcgactgaacctctgagcatcgtctactcctgtgtgtcctgtgttgttttcgcttttccggatagcagagccctgggctgaagcagtttgggggctttcccctttcacctccccctggttggaactgtaagcctgcctccaagtcccctactgagttattcctctctgattttttgcatagtggtctctgtgtgctggggctgctgatctggggaacaggacaggggatctgctactgggctgacccaggcctgtgcagcaaccggtaatcctgtcaggcccgtatcagaccccaaagaacagcagacgtttgtttctgcagcatgagacacggagaccagaactgttgtctgggtcttagtactactctttttaaatgatttgattttttttttttattatagtagtaaaacacattctttgtaaaaatttaacaatagagaatgtgagagacagacaggttccccaaactactgtcctgtgcctgagacaacttcacttcgcagatccatgttagttcttcgaatttttttcatcaattcatatatcaagtaacttttaaatatagaggtatctattttaagagcagatggtatgtttgggctaattgaattggctccgtcaagtgccattgtggtcttaactcttcccacccgctgccttttgtacccttgcccgcatcatcccaagtgcagagccaatgtccctgtcttcttttccctgaggtgacagtttcagcgtgtcattcctgggaggagtgaccaacagggcatgtactggtgtctgagtggttaggatcccactctgggggattcctgctggtggtataaccccgaccacagaagtcagggcctaagcctcagcctgccctgagatccccaccaagggggctgcggctggagggaggggcccctgggaagtatcctgcttggctgcacctggcttggcctctggagtcgacttcccaagtctcctaggaaggcgagggctctccttcgtgtggagtagacccttcgccaactggcctggcgtgtccgggaggcttcctttcttaaaatggggggatgaagcgtcagtcatgcttccaggatttatttcatcataattgtttgttttgggtttaacaatacagcagggagaagagtggcagaggaagaagagcgtcctctccaggccaggggtggggctgtggaaatgagaaaccggacgagacagagagggaatccagagagggctttgcggttgagtctgccagtctggagaaggctgctctccagacagctgagagtagggtgacacctggtgactcttgtggactgggcggagctgtgtggagcgatcgggagatccccggaggcgacctgcaggaggccagccgagtgcagcccttggggagtgtgtccttattatgcctgcagattatatccccattagcgcataattattatataatgggcgttattgcataatggcagttatataacaggtggcccagaatacagacagggggtgtaataagtgtatatcctctggctataaatagccaccagccccacaccaaatatgtggtcacaccagagccaccttataaatacccgtgctgggctataaatttctgagcagtgacgtcagcgggcatggtacctagttagggggtggtaggagggacctgcggccccacccggacacatgacatcattgtttccttagtaacaggaatgctcccgggggaccaagtgaagaaaggcctttaaagggaggaggcaaatggataggaagcttgagttgggggtgggtgctaagcctgggctgaacagggtgaggtctcctgggcagagtccttaatgggtgagacaggccatctgcccttgggtatttgacccaacgggaagcaaggcagtagactccgtttcctttcatctttagggggtctcaagtcccctttcctgtgtgtagcagattctgccagccttggctgtgtgtcagggagaagaggggagctacagagtcttccctgtccttctctctcccaggtgacctctacagggctctggggccacttgcttaagggagacccgacttctgcacccggtcatatcctccccagggcatgaccacttcccctaccagacgtagtaggccagtttcagccttagtaatctaagaaatatgtgagcaatttgatgcggatctcagagagcctcgtggaagtaatggcgctgagagatggcgcctggggaagaaagaggagacaaggatagtattctggccccagaagaaactatgaggtgggatataatctttttaggtgtatgggagattgcttcatatagggtggggaagaactagtcttcatagccctgagcatagaggaggaaatttgcctttggcagatgaggggattggaagaaggctggatgaccaactcgtcctggtttgctcagagtttcacagcccctcacctcggtaaacccctcagtctccagcaaactgggattgttggtcaccctagaacagtgattttcaaccaagggcaattttgtcccgcagggaacatttggcaatgtctgtgaacacttttggttgtcacagttgtggggggagggtgctattggaatctagtgggaagagtctactgcatatgacagtcccccaggaacaaagaatcatctcgcccccaaacgtcacaagtgcggaggtggagaaacccagccttagagggagaataagcagaccctgctgtgcgtggtctctcctcaggacgcctcttgcctctgctagcagagtgggctgcttggctgccttcctgaatttcttgcagctcttgttttctgtgctttgattggttgtgtttagggttctgtggcctggaaaccttttctaggaaatcgtgtggcttctgagagggtctttcccatctcaaagctcagagaccctttgagacagtgccatctcaaagtgagacagtgctgacagcaagccctgccaggcagtatggtattggtgtggatccttcatctgttatttaaaaaagaatggaaaaatcatcaaatacctatcccttattgcctaccaaagagtttctaaaaggcaaagcctgcctgttttccctgcctttcaggtcacctcttcccatatagacctgaacaggccactgcggctcctggggcttcctgagcgtagcagtcccagggtgagaactcacttccataaaagccagtttcccagacccagtgaccagggctggactctgccacccaaagaagcttcccaaatgaaacaaatgaggcaggagcaggagagagccaaatcctattctggcacatggagtttacagaaatctaggttctaagtgttctcatgtcatttatagaagtttccgtttagcccggcatatgtgaaatgtaatcatgaaagcatagcagacactgtttttcacctgcctttagtgcctgtttagtttactacctggctgcagttgacttggcgccctctggccttgaccacatgcatagcgtggccaactgggtcatcgtttctgctggcctcggacagggcccacagatgaaggccaggatggtggtggtggcgcagtggtctggtctgcaccagagatttggccagagagaggggatcagctgggctgtgggctacccgttgtgtgtgtcaggcccaacttttgagtttggacttgagattgaggcagctaataagcgtggatggggaggaagggcccaagggtctacatgcaaggtcctgcctgctgtgccaaaggggactctgtggggaacagtgctggctccgaacacaaaggccattgctccatggagcaataatcctcaggatattgccagcccaaaagatatggccaagagagaggcctctgccctgaggacaatggccagatttctctcacttatttatggtatcgtggtttacaaagtgggcccagcacacaaatctctgggcatagtttcaaatacatgcatttcttttaaattaaacacccccccccacacacacacatacacgtgtgtgtgtgtgtgtagggtctgttcaagccctgctgctgcccaggagtgttcccagccacgtgggacagtaactgaggatgatggtactgaagccactgtctaatattagattttgtaactcagagattcattaatataattactcagatgccagcctggcttggcaaggcctcttgaattgtgttcctcttcaacaaagtgctccggctgcagaaatgcccctggtgagcctgagctctgctaccttgcctgtgaatggggcagaaggcatgtgttggcctcctcactgcaccctgggagaggcagtgcatccccatggtggcaagtcttgcctttacatgtcttgtcacgaaaacagggaccttggagagtctgctgcagaggggagcaatctgctgggcgaggccccgtttctatgcaagttggccctgggctcagctgggggccagtttattttgctccgttgtgatacttagcatgcagtttttagtttctcttaggctggaatcttggagctgggactgtgttttatccgcctttgcatctgtctctcgcgcagcttatagttttatacgctccataaacccattttgaatattgaattaccttcagatgggaagcagcccatggcccatccttgagatgatgtaaaggctcacgatggtataaaaatcagaaagggggctgatgaaggaagagagccaagatgggaaagtggcaggtgtgctctctgagtgggcattatgaggggagaatcctgacagaggaggggcagtggaagcttccagaatgctggaaggagtgtggcaggcaagtgagaagctgtgggttaatgggttcaaagagacttggtttttcaaaatacttgtttttattttatgtgaatgagctctcaggaaaatggggaaggagcagccttcttctcagccccttccttcacccctgcccccgctgagtaccttgttacaggggctactgcttggtgggctcagcccaccccaccctctcataggccttttcttggtctccttggctgtccctgctaaatagtcatctttggggacatcctcccttttggccacaaagcacacagccccccagaggccatgtcctctccagacttggtctgcggagcagccaaactcactcgtgacagggtctcttcccgtgccagatcttccctgccacgctagcctggtggatgccctgcggcagggattggcagggatcagtcctgggcccactgggattgcttgccttttgctctgaggcttttcctcgcctccctccctctcctcaggagccctggcctccaggctccttgtatggacagactcatggctgctattcctgccctccatctcctggagaccccttcagtctgggcctctcgggtcagagatgactgccgtcctccagctggtacatgtgcttgcggctctggtagctgggtttggttattaacaatgaattattaaaggaatgtgaatagggagggaggtttgtctttcacacactcgcgcacacacacagccacttctcgaagcagatcttaaagttgattctgctgccgctgctgtacctttgcttgcctcggatcttagaactgtttccagtagtttttgagtgaattccgagcactccactttctaccttaagactctctagatagctccttcctcctctctcacctggtcctaaacctctttcctctggccccatgtgccagttcttgactttctctgagaccggttttcccctctgaagtcctccttgttcagtggaaaggtagctagaggcccaccaggcacccggtcttggtagtgtcacatgccacagcatgacagtaacatgaggacatttccctccttgctaccactctttgggctggagtccacttgagcatgaaagttcaggaggccaagcctgcctctcacaaactctggacacacaggggcttagtttcacgatcagctgattatgttgttctatgatttggggagtgtgcctggtacgtacagtccctcatctgtccactgttttaaaaaggttatttttcttattataagactactgtacattcataataaaaatacaaaattagcatgaagtcagggggtggaaattaaaattatacaattatgccactgaaataactgctattaacttttgttgcattttcccttacttattcatgcacatattttattttttactggaatttatagtatagacacttagggatgctgcttttaaaatttaatactgcagggcgcagtggctcatgcctataatcccagcactttgggaggccgaggcaggcagatcacgagatcaggagttcaagaccagcctgaccaacacggtgaaaccccgtctctactaaaaatacaaaattagccaggcatggaggcacatgcctgtaatctcagctgctcaggaggctgaggcaggagaatcacttgaacccgggaggcagaggttgcagtcagccgagatcgtgccactgcactccagcctgggcaacagagccagactccgtctcaaaaaaaaaaaaaaaaatcagtaccattgtgtattctactatgtcgctatttttcaaaatctaatttttagtggtttagcatcttttctttttcttgtttgtttgtttgtttgttagtttttgagatggagtctcgctctgtcgcccaggctggagtgcagtggcgcaatctcaggtcgctgcaagttccgcctcccagattcacgccattctgctgcctcagcctcccgagtagctgggactacaggcgcctgccaccacacctggctaatttttttttttttttgtatttttagtagagacagggtttcaccatgttagccaggatggtcttgatctcctgacctcgtgatccgcctgccttggcctcccaaagtgctgggattacaggcatgagccactgcgcctggccttagcatcttttcttgttagctgcattacccctaaattgtcaacttttctaatgacttctgtcccctattcccttttgaaaatgagaaattacctcttattataagtgtaataggtgcttactgaaaaataaaaacatgcttttacatgcttttttttttttttttttttggagacagagtcgctgtcacccaagctggagtgcagtggcactatctcagctcactgcaacctctacctccagggttcaagcaattctcatgcctcagcttcaggagaagctgggtttacaggtgtgcgccaccacacctggctatttttttgtgtgtttttagtagagacgggatttcgccatgttggccagcctggtcttgaactcctggctgcaagtgatctttccgcctcagccttccaagtgctgatattacaggagtgagccaccatgcctggcctgaaaaagaaaaacatgcttttaaacagcttcatgagatttcatcatgccagagctgatgtaaaccccacccccacccccactgaggcctttgagttgtgttgcgttcatccccattgtaaattctgctgggatggacatcctattacaccaagctttgtagctgtatttgttaccttcagctaatgcttcctagcagttgaattactaggcaaaaggtatggactctcttgaaggctcttcgtccatcctgttaaattgccatctggaaacttgacaccctcaggcagcacgcaaggatccatctcactctgtccctgtaccctgatcctattccccagagcctcagaaagatgttgccatcattgtacatatcgtgtacattgcacatacatgtcatgtcaggatgcacttttacaagtcaagtctcccatccctgtcataggtgtatgtcccgttcctgtatttattctctgcatcagctcacacattccttgatggacacatggtgttacccagtgtaaaagctaatcatggacatcagcccacattctcacaccctccaatccatgtttttatgaatctgaggtgcccccttccaggcctctgcagccacttcctgttagcactgctagaaggggagggacccttgggggtcaccgtggcatggcagtttcctctcagcttctggccttgggactgcagaagtggctcttgagactgtctggtggtgagcaggtgctggccatggtatcttaatggcagcagcccccaggtccacttctgaggtgcaagcccatgctggccgccagcacgtgccagagagctcctgaggaagcagctgctgctgacacctgaggccagctgcgcagtctgccacaaggcccctggggctgccaaggtcgcacatgtcctcccaggacttgaagggggaccaggggagggtgagctgttgctgtggactgtggactttgacatcactcatagacaccccctctctcacccttgcatcccagacagtgtcccccagggccatgcaggcagggacacacagcccccttgtgccctgccccaagtccctgtgtgtaagtgagcatgctctcatcagacttggtccccactgccatggcactcttatctgtgtgcctgaatatgcatgcttattcatctcgaaaactgggccgtagggccaggtgtggtggctcatacctgtaattctagcactttgggaggccgatgtgggaggatcatttgagcccaggagttcgagcctgggccacgtagcaagacccccatctctataaaataaaatttaaaaaaaaagaaaaaagagaaaatcgggccttatatcattttctacatcctattcggcccatggaagcgtaagtgtcttcagcctctgttgacccttgtcccccaccctttctctgtgatactccaccttacccagaacctgactgtcctcaggccctgggtagtgggagctgcctcaagactcctgaggccccacaagaggcttttgaattgcagcagtggatgtgggtagttgtgtaggacagagggaggcgacagcatcgtttctcccctttcttccttcagctggggctgtggcatggcagtgtgggccatccagtgtctagagggcttgtggccacgcagtcgtgggtgggatgcatatgttcatgaggtttgctctgttctttcctctgcagggtgttcaggatgtgctaacctgcgggtgtctgtgtgggtgtctgagtgtcaggaggtgggtgtctgtgtacaagtatgggttggggtgtgtgtgtataaatgtcagcttaattcacaccccaacaacgtaagaggaaacttctcagtcatgaggttcaagttcttgttactcctatgagctgtagtaggagtgcagtgagtagggggcacagcaggtatgtaacccctgggcccaactccaacctggcccctgtggcttgtagcttctgagtcagagggcgtgcatgcttgtgagaagtgtcaggcctttcccgttcgctcagcagctgagcagttcctttctggggttctttgtgaacctgcctcgctattaatctacctgttagtaaaagagattacaattgtcgtaattacagggcgctgcgtctccaccgtcaggactgagctgagtgagaggcaagggatgggaggaacccagccccacaggaagctgctattaaaagccctctgtttggatatggcacaaagacaacaacccttcccgggggctaaggagatctgggacaagaggcaggtcaggttccgggggtgaggagtgggctaaggtcccactgcaggctgtgggatgacacgggatgactgcagtactgaggatggtgagaacagcggtggcccgccggcagctcagatacctgggagcagcacagggctcagcaccctgaccacatgggctccatgctgaaggctgctttacttctggacaggccttcacctgcatagaatggaagagacctggtggcacttgtcatggtgagacagtggctctcttctgagggagctccacagccaccatggatttaggtggacaaacagtggtatcctggtctgtggctagcatgggccccagagctgtgtgtgatgcatgtgttcctgatagcacaggggttctcagtgagggtggttctgcccctagggtatatttggtagtggctgaaaacagttttggttgtcactacttgggatggggttgctactggcatctcgtgggtggaggctgggatgctgctagctgtcctacactgcacaagacgaccccccatagaagacagtatctagccccagcatgaggggtaatgaggttgagaaaccctgactgaggccaaggaaaggaacggcagcagggcaagccaggcccaaggagggctctaagaactccctgatgctgagtctggagaccttggcccacggtgctcagcagtctgttgccagggaggtaggagagaggggcagcaggcacactgggttgacaactgcactgtgttgaccccatggcgggcatcaggggaccacaggctgtggttgcgcctgtccgttctccctcccttttctcgtaggcttcttcctcctccagtgcaagagctggatccaggattggagaatttgctcttgcccacctctccatgtcctcgttgccgactgaggcacctgggagtgaggggcttggacattcttcctcagcttgagccccatggacccctccaggtgggaggagtccagaggaagatacgcagaaataggaagggctgacactctccagcttccatcttgcaaggacacaggccccaccctggcttctccccaacacacatctggcctggtttctgctctgagaaatggagctgggtggggcagaggcctggcaagtaaacctggatggagtgtaggaagcctccttccaccattcattcctgttgaccaaaggggcatccctgcaggcactcctgcctccttttccacttttgttttcaactttgactcccactaccaaggagttctcgggaaagagggtaggcctgtgggttaggagggcaccatggagggtagtctgtggggctgggtgagatgggtgtgggaacgcagccctgtgtttaagggtatgtgtgctgcctgcttgctgtgggcagggtggcttctgatgccctcccagcccttgggccactgtgtcttgtgttttctgcagacaaagcatggagattttcagctgttgtgaattctgcgtttcacaccgagtccctaatagtggaatcgcgttgccttccccccccctcttttttttgccttgacagctccaaccttataattttaccttctttttccttgcatacactctttttcttccctttcccgttcctggggcttttgccattcatcgctggggaccccctttaggagggattgctcctgacaagaggggaggggcttcctgtcaaacattgggagttgatgttttgtttggtaaaatgtctgtaaataggctgtgaggcagtcgttctacatggatccctgtgtatgccagcgtctttttgtgtctgagcatgtctccaagcatgtgaatgtcaggagcagagagaaagggaagggaagaagaagggaggagagagaagagggatggtgtttgggggcattgggatggctctcttccttcttggtctaaatcacagagcctgatcaggagagggtcagagttccagactcttgaagagtcaggaagaacatcagaagtgaagctactgccatctgaggtggccctgggttggctattcacagagggctggaatgggatgatggggctgtactccccactaaggctgccagatctggaacttgaccttgaagtctagttatccaggactcttaaggctctgagggtaggttgtaatggagactgtttctcctgcccagcatcaacgatgagccttggattcttgggatcaatatcagtcttccaccgtgaatgggaaacccatttctccctggagacaggttcctctgcaagaccactcccttattcttttttctttctttctttctttttttttttaaagtaggacgccttgttgctttagatggactcctttgttaagcttcaggtagcttacctatcctatgatttgatttacagcaaactcactaaaaacattggtcagtttgatttcaaaaacgtggccacatccattttcccgccatcagctttccagaccacagaatgctctgcttttgagctgctcctcagctgacaccctccttgaatccattttgagttgctcttccctggccccattagaaaatgtcggctctgactacaccatgcttgcgaacaaaggtgcagaacaattttggctgcttcgtccaggaaataaattcctcttcggtgccagaaaccattgagtggtgccatgtgttgagctctaggccccagaactgtgggcagggttattgctcagggtgaggagtgtggaagcataggataaggaggccatggggaggagacccttgcttcccggacatccccacgtactttgggtcaagaacctgaggacttgccatgtcccctgctctctctctcctggctttccatctgcagttgcccatggtatggctggtctgtggacttggggaagacaggcccctctctttgtcccatggtggcagcattccggcccggttaattgcatgccacccttcccaggtcctcttgttccgtctgctcgatgaaggtaaaggctgatttccctgggatctgcccatgctctgcttctcgacctgtgttttcacctgtaatcagcaatgccacttatcagtgtctctgaaccctatctcatttaagcccatgacagtccagtgaactcggcacttttataatccttgtgttatgcctagaagctggcagacggaagaatcttgctcaaggccacccactagcgagcagcagccctggggcctgtccccaccctgcacatctgcccctcactgctgaccaccctggcttatctcagggtctgatttctccttgtgaactctaaactcttctttccagctaccaggcagatgccttgtggacagcttgcccccgtatccacaaggtacctcccagtactcctggctgccctctgctccctgctccattccttgtcttggctgtgggcatcaccacctagccaagcacttgagccctcacaaccagactaaccacaggccggtgaaagggctgaagcctccctgccttttcaccaggctgagttttcagaactcagtgtcttctcctctctgttgtattttttttttttaattccccatctccccaggttggatttgtcttttattaagatataattcacataataaaattcactattttaaagtgtacaaggccaggcatggtggctcatgcctgtaatcccagcgttttgggaagccgaggcaggaggattgcttgaggctaggagttcaagaccagcctgggcaacacagggagacctcatctctgcaaaaaataaaaaataaaaaaattagcagtacttggatttgtattttattaagatttaaatcacataataaaattcagtattttaaagtgtacagggccaggcatggtggctcatgcctataatcccaacattttgggaggccaaggcaggcagatcacttgaagtcaggagttcgagaccagcctggccagcatggtgaaaccctgtctttactaaaaatacaaaaaaaacattagccaagtgtggtgatgcagcctgtaatcccagctactcgggaggctgaggcaggagaatcacttgagctcaggaggcagaggttgcagtgagacaagatcgcgtcactgtaccccagcctgggcgacagagcaagactctgtctaaaaaaaaacaaaacaaaacaaaaattagccatgcacggtggtggcgtgcatttgtaatcctagctacttgggaggctgaggcaggaggattgcttgaacccaagaatttaaggttgcagcaagcgatgatcacactactgcactccagcctgggcaggcaacagagtaagactgcctctaaaaaaaataaaaaataaaaaaataaactaaaaattaagcataggattcagtgccatttagtaccttcacaatgttgtgtaaccatcaccaccatctaattccagaacaattccattgctcccaaaagaaactccatacctattagttgttagtcccaattcctcattcctcctaggccctggcaaccgctaatctgctttgtttctatggatttgcctagttgtggatgtttcatataaatgagatcatacactatgtggtcttcatgtcgggcttctttcacggagcataatgttttcaaggttcctatatgttgtagcagcaagtgtcagtggttccttttttttttttttttgagacagagtcttactctgtcgcccaggctggagtgcagtggcgcgatctctgctcactgcaacctctgcctcctgggttcaagcgattcttctgcctcggcctcctaagtagctgggactacaggcgcccgccaccatgcccagctaatttttgtgtttttagtagagacagggtttcaccatattggccaggctggtctcgaactcctgatctcgtgatccgctcacctcggcctcccaaagtgttgggattacaggcgagagccactgcacccggccagttcctttttaaggccaaataatatttaattgtatggctgtgccacattttgtttatccattcatacattgatggatatttgggctctttccactttgtggtgtgagtaatgttgcagtaaacatgcatgtacaagcatttatgtggatgtatgttttggattctctagggtatatacttaggaattgccctgtcctagagtttcataactgcattccttgtgcatcttgtctgcccagcagtgctgtccccttagtgggcacccagggtctctctgggttgggcccctgctgacccttccatcactgcatttctttacttctcctatactgcatattccagcatttggagctctctatagcccctgagtgtgctgtgctattcctgcctttgggcctctgctcatgtgtatctggcatggtcccttccccttttgtctgacggcctctatctttttacccccggcctggctgtcacctccttggtgcagccttgtcccgcatcacttctcatcctctgaggccagtccctccctctgagggggcctccattttgtccattacacaccagctttcagctgcaggggggtgttacccaggcagcttctctggctctgtatctgtgtggttcctggcgtctagcaggtgccaacaaacacatgtggaattaactttaaggcactgcatgtgcttttccaagtgtgcatgtcacagatctgtgtgtgacccacacagatttgtatgtctgcccctgcagacatacaaatgaatatagaatcaaggtgtacctcccattactctctggacccctgggtgtcggtggcctcatatttgcttctctgtgacccagacaggacttggagagctctagagtgattctgaggaaacccagtcccctttaacccaaacaggtgacctaactgttccagactactggggaagctctggtcacaggggacatgcgacctgtcttttggctctttcccttcactcctctaagcatgtggctgagtagcctgcagacagatggcctgtcccttccgtccttccagaccagcccccttggagatggccctgggcagggagaaggcaggccccaaagcagcctccaggtcccgggagaaaagcatagttgctaccctggtgttgttggtaatgacttggcagtggagggaggagggtgcatacctccaggaggatagtagcaggggagccacggagtagctgccccatggcttgggtactgtgctgcagatctcatcgctgaaggtgtggctaaggctgtcccaccaggtgtttgggatgctgtctggcccctataccagccccactcagggccagagggctctaaatgagtcactcagctctggctttgccaggtggcccagggtagggggatgcctcaggtgggcacatcacggtgctgccaaagactcaaggaggaagaggggtgtgtctggccactacccagagctcactcagggtactagggatggaagggaagaggaggggaatgctgtctgacctgacagcattgcacaagtcagccgtcctgcaaggtggctctttgctgcttttcttctcgctggttctcccctgtccttctctagctgggattccagctctagtcagccagtgacatctcccccgtacccaggccagtgagccagatttttttccaagcctcaagtcaggcaggttcggggaggagacagcctctcaggcgagtgagctctagaggcccttcctcggagaagcccagccctcctcctcctcccttcttggccctctcctctccctgggcctcttccccacgtggctcattacaactccagttgttcaggtcttgacctcaagagccttccctattgacccctgaccagcgatactaatctgtgtcaacaggccccaggggttaaagaaacacaacccgccgctgccgccttagcaggtgcctggagggggcggggcggctcccgggagcagccgggcggctgcgggaaggcacttcttaggcgccgcctcctcctcacagcgcccgccttctccgctccggcttcatgctctccaggtttctccacttcctttgcagacctccctcctgccgattacccactcctctgtgccccatttcccttctgtctttcctttgctgtccactctgcttgcaggatttgggaccaaacgccctcaggcatccaggtggtgcccgggttgatatgcagctgcctgcccttgcacctctgggggcttgttaaaatgcagatcctggggcttgtccaagtgggtaggtctgggcagggctcgtgaatctgcatttccacctagtacccaggtgctgttggtcctccaggctttccccctgcctctgccagctgctgcctctctgagatgtgctcttttgtctccaggaatggagccatccttaggagacagaggcacactgctggccatctaggctgggggtagagcccagatgggagcccacctggatggcacgaaccacctgagtgatccccctgttctcagaacacaggtgggtcacctgaggatgtcctggtgacgatgcaggagctgccaggcaggaccaccatgagtcactgggggtcatgccagtgagcttcctgcgctgctggccctggctctgctgagggccatgtcagggtgaagggggcacactcctggcttagataagacaatccagattctctcagagaaacagtcacatgtcagacatgtgccctttcttgggctgaacctagagttgttcatagcctggccttaaccctgccgattccatatactgtgctcatctcgacccagttgaggctgtgcttctgtgcttcttggaacggctcggctccagggccgtgaggttggcaccccctgcacccgtccacacacacagaccagaggagtgaggatgatgaggacagggacattaatcacagttctgttctgcctggcactgcagcccaagtccccaggagtctgtgtcttcccatgttcccttcgtcctgttcacagggaggtggaaatccagacagaaacctgccttctcctccatccccacttgaagctgctggtactgcctctggccatccagccttaagacgtcccttccttccgtgtggccccacagccacaggctgcccctcctgcacagtgcacacatgtctggcaggagatggcccagagaaggtgctaagcagaatgcggggtagggcttcatcagggcctggtgtgctgggtggtttgacagtgttttgtgggggtctttcctgtagctccaggaaacctagatgggggtcaggctggctgagggagcacccttgggtgctgccctttttccgagtgctctgcttctctttgactttactctctatcccctagtcaccccaacccactccttttccttcttcctcttggctgtagctccctcacagggctggggagcaatagacaaactctccaaaaatattttttttaagtttcccaaacttttccagatgccaagaaggggccagggaaactgcaactgcagaggggggaaggggagaggaaatgttccaaggccttccctcccttccgcctggaggcgaggataactatgggagcagggtgactctggtgccctcagacagtccacctggaagggagaaaggcccctaaccatcccacccttgctaccctccagcccatcctccatcctcattcccaaagcccccagcagcatgtagaggtagaggcagagaaggatgtcagtggggcacctaggaacttctggggttcagaagggtggatttgggacatatacccccaccagttgagggaggtcaggagctgagaagtaggagaatctgtccccaagggctccctccctgggagtctggggcctgatagaagaacctgccactgctggggttgaggtgtgggggaacagacaggagggggtggtgtgtgaggacagtacagggatcactgccctcccccagtcccaccctcaaggggtgctgcccccacctctaccattctgtccatccactccctggacacctcctaaaacaaaggcctctttgtggtcctggcctactggcctgcggccagcggcattctttgcgtgtttcctgagcacggatcccagcttcgtggtcagctcctcccccacccagcctgcttcccggcctgactcctggtagctcagagcagtcccctctcctgtcctgcccagggtcctcccccagttcccgtctctaccgtggacagatctggacagagaagggaaactcccaggagcttggccactgggccttcggtgggggttgggggacaagtggaggttcaactccatcccagctccagctgactttggtgggtttcgccgagcctctgttgatatgttctcatctgtaaagatggggaaaataaccaccccttggggctatcaggcagattcaatgtctccaaaacacagagctcctgcttgccgcagagtggaagaggcagtgtgtaactcgagctccccatttctgcactgctccctgggttcctagggggctggaggtgggcttggtgggcggctgaggagctcagaggagtctccagagtcttgggtgggacgtttccctgcactcctgtgggtgccccaaacctatggcccactcctgggagtgctgaggccagtaccccagggagtcctactccaagagtcggagctgggtccgtagcaagtggcctgcctgtcctaggcctggtcttgctctgtgtgcccccagcccctcctggcatccatgtcactctgtaacagcagtggggtgtcctccctgggttaggcatacagggtggttggtgcctagagccctgaaaatagcagacctgaggagggcgggggtagggggaccaaggagggatggcccagcttttggagaacactttcgaatgtcagcagatgcacacccttcagtcaccagccacagtcacacacagagacacacacagtcctaatgaagtcctagatcactgctttggggggttttccccccctcttgttaaaaaatgttcataatttggaaagaaaaggagctttttacaagctggcggctctagagaactttccgtcggttctttctggcctcgtgatgggtggggcccacttttcccttccttctctctctcccccgctctcctaataatcccccctttccagcctcaccaaacacacacaccctttaggagacctcccgccggctgtcaccccaagaaagctggaggaaagccgaggacctgtctgtgccctcctgggccccatccaagcgccaggcacaaccctccccccctccccactcctccctcccacttagaggttggcccccacaggcctagagtcttcagattgctaagcttcccagaatctgtgcctggacccaggcccagcagcctgcctgcccttccccgagggcctgccccactctcccgcagggtgagggtcccccgagtccttcttgcatccgggggccccgccagggagggcagtgctgagctcaccgcctcggcatctgccctccccctgcctctggtgcgagggccggccgcactcccgccagtgccttgctccctaatagctttttaagtccaaccacatgtgtctgtggagtgaggagccgcccctcacggggcctcggctctcctcctccctcagccaagaccaccctccacttggagcagcctcagggctgggggaggggggggtctgcctcctgagagcccatctgctcgccccgggcctagctgaggaagaagggggcgggggtctcttttgggagtgtcgcgtgaggccagccctcaggctcggctggccccaggttccccagcctctcctctgggtcctgcagtctaggatcctctctctctgtagggcaggccaggagggactggcttctgggtgtgggagcctgggtgaggagtcctcatctcacctcgcgcctccctggccagggactttggccagcaaatctctccttgcacccagccccacggaggtgaccccccagtcgcccctcaactcaatatacgtgtggttccctgtgcgtgtgagtggtctgtggggaggcctgtggggtgcggtttcgcaggaggggagtgagggctgaaaagcaacgagctagcaggcttggggtcctaatgagaaaattgcttccagccagggagccctgctctgcggctgaaattgcatccagccccagccaactttgctgccgcagtacccgcccttcggaaggagttggggaagcaggcgggcagggggaggagcgggctttgcacatgactcaggcccccccaccgccccgttctatatgaacacaccttgaagagtctcttctgcctcacggggaggagcttgagggtcaggcttggctctggacccgaccgtttgatccttgggaggcagaggagggagtggggagggatttcctttctgttttgctcagttctgctgcacttatgaggtgctcactgtgtgcagagggcttggagaggtgagcttgcataggctgggcccacatagggtgggcccacccacccggtggtattcactcttactgttaaagggtgttaggagcactttgttttcacaaagatcctgcgtggagtcccgccttctaggatgcttcatttgaaattcggcctccctggagtggggtgggaccctcttgcctgtccttccactcgggagcccagtgcctacacccgaggccagggaacccaggggtgaaaacctggcttagctacattcttctttctgttcctcacttacttggaccattgagcagaatcagctgcagaatttgtggggcccagtgcaaaatgcaaactcagggcaccttgttcaaaaattaagaatttcaagacagcaacagtggaagtcaaggttatgaagccagccctgcttccaaggaaagctggtaccacccagcagcccactggttcaggggctgtggcctttgccctgatctgaaacaggaggttccacctgcttgtttcctggatcctggggaatctcttcccaacctgggacggtggtctccctgctgctgcatccctcagagactctaactttctggattttagagatgttgcttagggaggagggctatgaggggagggaacagaatgagaatggatcacaccttcagtgcttagagagtctcagggcaaggccgcacttgtcacccttaggtgaacctgacagtggaaccatatccctggtgaggtggaacctgcagcctgctgggcccagccagtagcgggtcagtgggaccttcccctcctcgggtggagcctcccccaccaatgacaagttctgacggctgtgcctgtgcagagcggggagcgagcaggagtgcttggagggagggaagcaggcaggaggaaggaaacaaccccattgtcatcccccaaattactggctgggatggcaggggaggaggcggaaagccgacattgtttacttaattaaaagtaaacaacaatttgccgctgccagcctcccattagctgtgtgcgaggagccctacgagctgcagactcggctttcgctcccaccaagccggctcctgatgccacacccccagcctcggctccccagggccccgggccctcccctgctcatgtcctcctcaggctgaggagaggggaacaagctattaaaagtaaataaatacataaaaagaaaacccactagtgtctcagagtcctgtgggtcaggataagaatgtcagaaactgtcatgtggcaggccagcatggggcctagagacccctgagtgtgtacactgaggtctggttgtggtgggctgggcagggcagggggcacttctttgtccagtaagccagatgttggactacctggggaaggcagcccctcccttcctccctccctccccgcaaccgaggccctagtctatactacctggaagcctgggcctctctgccccaactcccactttttccttttcccttttagcagcttataaacatccttctcccatctttttggctctgctcccagaagggggctgttcagggatcctggagggctggggagagaggcaagctccttggggcctgaggggagaaagacagctggaactggccccacccccaggacagtacagctacaagtgaccctaggaacaggggagggggttgccctaagttggggtgaggtggggaccctcccagctcctgcttctctggagccttcaagcaggaggggtggttggatggcaagaggggttttgcatgggcttccaccaggctccaggggctaagcaggacacctttccagggatctgtcctcaggaaagccctcacctctcctgtaggccctgcctgcaattatgtagagcacaggcttccatctggacctcggtaggcatgacctgaggcccatgactttaaaagctcaggatgtgcgctgggcgcaggagctcacatccgtaatcaatgccagcactaggaggcccagaccagagggtcgcttgagcccaggggttcgagaccagcctgggcaacatagggagaacttgcctcttctaatagttaaaaaggggtggtagcatgcacctgtggtcccagctacttgggaggctaagtagctgggaccacagctgcatgctaccacccccagctaattttttaggagagctaggagggtccttaagcccaggagtttgaggctgcagtgagctatgatggcaccactgcattccagcctgggtgacagagcaagaccctgtctcaaaaaaagcaaaaaagaaacagaaaagaaaaaaagctcagggcccggatactgcagggagagaagtacaggagcacatgaaacgtacccagctttatgaaaccattgctgagcctccttctgggggccagacaggcaaggtggggaggggtaggtctgagaaaagagctagactgagtgaatgaaacagccccaatccccagggtgtgggggttgagaaccctggtctggagttggtccctccaggaagatgtaggtccccactcttccccggagccaccgtctcacctttctcttgtcccatcccccatcctcatttgcctcctctcatcttagtcctccaccattaggattcacacatccacatgcacgtgcacacaagcgcatagatcccgggattcgtgcacatcgggattttcacatgcactcacacacatagacaaatctgggaagtctgtcccatacttaattgaattaaaggactggggtttggcaggacattgtgtatctgagctgcagcctcttgcagccgtttcaagggctgatggttcagtctccctgtaattccagccgctgctgctccctgtgggcaggtggctgggtctgcgcctgtcgcctctccccttccccttctctctccttttacttcctaggccagagccccccagcacagggcctggggaggctggggacacccagtgtattcctcctcccttctcccacttgcattctgggagctagtgggaggttagggcctcctgaggaggaggtacccccagcgtgaggccaggggactgtcagaatagaacagtccaggcaaatccctccttccaggttttctgctgcccattcttggagtgggagctggaggctgcttgccactggttggaaagtggacacacttcttggccaagtgtaagccacctggctttaaaaggtggagagtctggtctaaggactttggggaaccctactggagtggccaggagccataatgattgggggagtggtgccagcagatggggtgtgctgcagggcaagagggatgctttttttttttttttctaatttgatttaattagaattcttttttttttttttttttttttttgagacggagtctcactctgtatcccaagctggagtgcagtggtgcgatctcggctcactgcagcctttgcctctggggctcaagcgattctcttgcctcagcctcccaagtagctgggactagaggcatgtgccaccacacccggttaattttttttgtatttttagtagagacggggtttcaccattgttgccctgggtggtctcgaactcctgagctcaggcgatccactcgcctcagcctctcaaagtgctgagattacaggcatgagccaccgcacccggccaagaggaacgcttttggcctccatttcttccctccacttcagcctctgctttggcaggctctggggtgggagtaagcctgttctcagctcccctttactagggacaggtaattccactctggctgctccttggagaacagagtggatgaactcagtccccacctctcagagggacctagtacagagcccagcccccactctgaggaagccttggatgggccattcctggcccagagcctgaggccattggaaagggcctatatctggaacgggtgaaggagagagcccgggagcctcactgtgggtgggaggggcgtggtcagccagccttgcctcctggggcatcagctcccagcttgtgctgcaccctctgaccacaactttgtggggcgcctgctgtgtgcagaatctaccccgaaacctatagcttaggagaagcctgggtaagctgctaatggctggtagtatgggtgtccaaggacctgttggaggagcccagtccagccctacatgtgtgacccttggtgcctggcaaggcgggggggtagggagcagccctcgcacagccagctagactgttttgctctggggcctgaggattgcggggccagggaagcaaccaggcccagtctggggccctgtgaagcgatctgcactgcccagggtcagggggatgggggggtcggcctcacctcggctaacctcccagcggaacaaaggggcctttctccacgcccgcccgggagggtgtgcccgcccggctgctgccgccactgcagagggcgctgattttttttttcttcctgacttttctccatttctgtctctggttcctgatctctgacttttattctccattttttcactttttatggggatggggtagagatcttccttttcaagtgtttaccaattgcagagacaagtctgcactgccaaaaggtgagggcatcctgggtgcgttaggaatactccgggagtcacgtggccttagacccccccctcccccccaaatcgagggcagctccgttctgaaagaagcaggcaggattcagagcggcagccacacagggtgggaccgggctcactggataacccccagtcaagctatgcacctggcaggtcccccgccttctattcgcccacccatttcgcagtcccctttccatccggcccatgcaccgcaagctgttcctaatcaatgcgaacgggaaactcggccctcatatcacgggatgtgtttggcagcgacagcaacaggagccgctgccacgggcagctccttccttggtgcataaaccagggtcccagtggcctgggcctgagtgggttcttctccttcctcttgggaccccctgggtatgcagagggaaccacatcccctggagctctgggccggtcgctggccgcgccccgccgcagccctcggagggcagctagtgttaactcgctgcgccacctagctatggcgtccaggagtgcagcgcttcgctccctgaaccgcgtcgcttcctgagccgcgccgctccctgagccgtgctgctcggcagcctggggaaaacctctttttggtccttcagggagctatgaatgaggaatttggcagctgtcagtcggaggatcagtgtcactttgttccttcagcagcctttgctgtccttatgcaagcttggtactttatagtatataaaactcaaagttaaaatatgttaaaaaaaaatctgtaaaaatccccactcacatctcatgttgctgagcaggtcttggttgtgttgcaccaagaagcaggagagacacactggaggtctaacagcagcaagtctaggatttggagcctaggcttctgattccaggcccagggctctatgcagcactcggtgccgtcctattcaacccatccctgcccaggctcttagggctccaagctggaaatttgcagtcaaaggcccagattcctcgtatttcctctggacagctctggacagtggctgccttcgggtctccagggcaaggagaagagcaggcctgcgagagagtgctctgccttcccctgctgtgctgttctcagtgaggctccagttccttcctctggtcattccagcccttgagtatggtgcaagtatgttcagtcctgtgtctggaaccagctcggctttgcaggaagattagcagcatcagggtttccacattaattcactggacatgagtgtcggtggttgggctgcaagaaagctattctttcttcaggagggggaagatgtcagctagctggtgcctctgttccctgggtggtcagtgtagccatggtttgaagaaggatctagaagggtctctttggagtcttatcatccactgcagctgtgctttgagatgtgggggatgtagcagcaaacaaaaccaacagagagggcttgtcctcaaggggctgatggtctagtggggtgttcctggtcaggacctcctggcctgagtggcctggtggccaggtctctggggctctcatgccttccagagctagagcctcccacttccccagccatggaccagccagaggttccctgtgtaggtgggatttggaggaaaggctgtttagtttccagcctccaggtgggagaagggccccacttaaacatctgattatggtgggcatttgtgtttgttgcttgtccatgagcccagggtcagtccctgctccaccaaggcaagtctctgggtgaaggaggcccctttggagtcaccagcctgggtactgagtgctctctcacaggggtattgagtgctctctcacaggggttgaggaagttagcacctgaggaggggaggcaggtggcttcagcctaactcccacttccccttccccacagggtgaattgaagtcggtgggttctacagttctaatcccaggccctgaggtttcctggatggattcttccaaggaaagggaacagtggagggaggcaggagcagaaccctgcttaaggccagaaagagagcagggggcagagagaggtggtgggggaggctgatgctccccaatccctgccgaccctctgtcctttttgatttcctcaggcaaataggcagagagcttagggaccttcccctgccctgggctaaagtgaatttcctgctctatagggtctcacttcttccaccttccttttcttagccagttgttccttctctgagccttctccttttccttttcttcttccttccctcccttccccagaagcattcaggggtgggtgagtaggggctccttgtcctggggtctccccagttcctcactctgctgagtgcccaccagacagatgctggcagctgcatgcagcccagcagttgtgcacacaaagccactcttgagtatctttaggaaagttttcctctttctgtttttttttttcttcgcccaaaggaataatttcctctctgctcttttttgtttttgtcccctttccctgcctctctcagaatcttgtactgtactgctctgattcttcttgccccagtcttctttctttgctttggccctgattctctactgtggctcctcctctctctccctttctctctatcttttagttttagttttgtcttttggttgctctctggctctggggcttcctgccttctcgcatccctcctccaaactcctgcttgtcccaggcgcatcccttgagtggcctgcagagcctccgcctcctgtttctcataccaggttggcattagagtctggaggactctgtccctttatgaataattagaccaagggcaagtgtatttgggggtaggaggagggtgatgcccagccctgggaggttgggacactattaatagccctaagagcagctgggggtgagggtgattgtctggccagcctgtcctgtcctgggcagctcaaagggccagaaagggcagtgctggaaatagagaaagcgggtgggggtggaagagcagctctgcaggccccttgctgggatgggaccccccccctccccagggcccctctcttttcttgacatgtggggtatggagggcattctccactgtcagtttttcttcgtcaagttggggaggggatagaagcttcaggggctgggggccgcttgcctggaccccaccatcacatgactcttggccccaggccctctcagaaatgctggctccagctgccggctgaatcgtggcaccagccagcactgccaggagaggcgcctggcctggacgcccatgggcctgtgcctgtgctcctggttttctcagctctctgtattccaaggctgggctgggctgggcaggccttgggcctagcactcccagagtctagggggacaagctctatcctcccttttccctgttggccctctctcccccacccctgtttctagtatggtgactgtcttgagaccgttggatggctattgcacaccgatgtggggagggatatgcctgtacaggtgtctgcccaggctctgccattatatttgcagagaaacctctctgttgctctttgtagatggtagtgggccaggccccaagggagcccctctgttcactggcagtggtccctgggtcaagacaccaaaaactgcaatctaggacacactcaccatgtactcaagagcgtgagctcctggggaggggagctgagggtcagccacagcttcccccaccagggtgggaggtggcatttgaacagagttgagaaggaggaataagcattcagcaaatggagatgaagggaaatagtaatccaggtggaaggacaggcgacatttatgtagccccaactatgagccaggccctgagctaagcaccttattatacatgttttctcatttattccttacccaggaatgctaatggtaggtgttatctcccttttacagatgaggaaacagttcataacttgaccaaagtcacaggctggtaggttctggagcacggatgtgaattgggggagccttggtatgccgttgctggccacccacctccttcctcctcctaccctccatttcagcatgcccccttcggcccctctgtgctggggcaaggccagctcacccaggatagggtatccacagtggtagagcactgtgttgtaccccctcagtggacacaggctccagaccaagggcacctccctgggtaggccaagggcaggctcagaggacaggggaagcagacccaggccaatggctcctgcccaagatgtttttctttgccttcttccttgcctgatctttgcctgtcatcttcaatctcttctgctctgatgggaattcctaccccaggtatctctgaaacaccccagacagtgctgctgccatgccctgggtccacttgttccctccatagtcaggtatctgaggtgctaggtttggtgctgggtcaccttgccatgggcagacacaggaggagcctgcaggcccactcgcatgtcccattgctgctgtggctgggggtctcatttattaactgttgggctgatcctggagtggccattggcaggtgggcctttgtccacctgctgggtgctctgttgtgcaccaggggcatatcccttctctctctcctttgctggccactgcctgtcatcccttggggaagagcaactgagcattcagttccccagtgcctcctggcttcttctgccgctccatgcctgggcccatctaaaggagttctccctgggctggggacggctgctaatgaacgggagccaagcagagaacgctgagtagctcacaccagaagaactccctggagggctccggggccacttgctggggatggaagggaggtgggagttctattgttttcctggaggaaaattttaagcttaggaacacctttctcattatatgagggaggcagtgatgggctgtgtggctggaaggcttctggctatgagtctatctccacatggggagtggaggcaaccaaggactgtaggagacaggccttcttcacctcgacaccgtgtggggcctgaggctttcagatgaagtgtgagactgctctgctggtctcctgggtacaagatgagctgatggacttgctttctcctcgcttcccgaagccttactgccgagctgtgagtcctgtagtagccaggcctggcacttgctccaggggcacccgtagaggccgggatgtgttggaatggagaaagtagttcttcctggggtcaggggatggagaggggaatgtcccatccagatgctggcccttcatctgccaggttcctgtgccttccctacccccccgcccccaacaatggcttttcttgagcctaggccctaggggcagccagagcaggcctagaccacatgtgggtgtcactcggtttcttcctctttcctgtcacttatcccctctgccatgtcctcttcccccatctccagcaggtcagtcaagtcaaaggcagaagcccctttggatctgtgagcagggagggaatgaggaaaggggagaggacgataatggggtgacatgttcccctgtccttatccctgcccccacccacagcttgcgggctctgcttcttgttcaggctccggctttaaaccatgtgagactctagggatgacagaggagggaaaaacctgccacctcaggatgactccaggatgtgtgtgtgcatgtgtgtgtgtgtttgtgcacatgtgtgtgtgcacatgcatggtggctggtggagcagggtgaggaatggagagaaggagaggaagatcctagaagccccgtgggcccagaccctggccaagcctcatcccccggccctctggctgccctgcattctcaaggacttccttggtcccctgagtctcctgtctgctgagacggggagaacccctctgtgacccgtccccttagccccccatctatccaccgttcccctcctcagggtgtctcagattctcagacttcagtttcaggaggcacaatagttacattctccagctctgattgctacaggcagggcctctggctccccttgagattgggtttcctgtgccctggacgctccagaatctcagaggaagcgggagagaagtaggaggcgggtgcagtgctgggagggccagtgattggccccagaatcgcatcagcccttcagaggatggggtgttgcagctgcccagaggcacccccagaacagaatgtacccccacttgcttctggaatgtcaggcctgggagggccaggggatgggcaggcacaccccaagggctgttctccccgtttccaaaggccagcggttcctgcagagttgaaggggattcctctctggtggctccagatgtaccatctcactccaccctttctggacggcaagaagtggttagtggcacctccgtgtgtgtgcgcgcgtgtgtgtgtgtgtgtgtgcgtgtgtgtgtgtgtgtgtgtgtatgtgtgtgtctgagtctgagcatatgagtgtatgcatccaagtgtatgcacatacctgggtatgcatatgtgggttcagctaaggccaaatctgtgcacacccctcagcctccataaaacttgttaggccaaagtccgtgggggcaattggccagcaaattatacatggcccctttcacagtacaagtttgtttcgagcaggagctgagggcagtgttggctgtagccagcaggaattcctccctcaccctagtgggagccataactacctccccatctgtaggtggaaaatatatatatatatattaaaaacatgcatccgggcacggtggctcacgcctgtaatcccagcactttgggaggctgagacgggcggatcaccaggtcaggagatcgagaccatcctggctaacactgtgaaaccctgtctcttctaaaaatacaaaaaattagctggtcctggtgacaggtgcctgtagttcccagtactcgggaggctgaggcaggagaatggcgtgaacccaggaggtggggcttgcagtgagccgagatcgcaccactgcactccagcctgggtgacagagcaagactccatctcaaaaaaaaaacaaaaacaaaaacaaaaaacaaaaacatgctgtcagttggagtttatgtgcaatcccaggctcctcctggctgctggagcttcccctccagagctctactgaagaggcagtgtcctcttggaaacacgcacaagcacacgtgcctgcaaacagcagaaggaagaggggggtgctgaagaggtgagggggaggcaaaggaaggacagagggaggggagccaagggagacagggaagtaagatcagaaatggggatccaaggggaaaggcagctgaataaaagaagtaaggtggggacttgttccaggggctgagaaggggagctggtgtgggtgtgagaagggcaattttgcaggagaactttgtggctgttccagaggttactgaggggcccccaaggaagagaggggcccagagtggccacttggctcagcctggctctggtctgggcactgccagaggcctccagcccacaagctgttgttgctgtggaatgaccagtggtgtgcagatgaatacagagtggccccagaacctggagccaaatcccgtttcaaaggcttcttcagcagagcccacttgggcccatgcggagggagtccagtcttattgcctgctccttcgtagccctcccttccagaagcctgcaaagtggccagaaccatgggcaggggaggcctctgcctcagagacatggatctcacgagtagcccaggtccccagagaaggacagcccgcagagctgcgtgtttgtgtgacacgagccagcctgacacccccaaacagcatcgagaatgagctgtgggctctgagatactctccctcccctagcctggcccagaaaccagggaccccgaatgccagcctggccaaggcacctgtcggacacagcggctgggctcaggttttaggcagctgcatttgatgggccaagtgggaagcagctaagagcacagaaagaactctccagcttccagcaccagcatggagggaaactctgagttggtgtggggcgaggggaagcagcagcacccactctatcccatctccaaccagtatctccagggagcgctgggagccacagtccctgaagagactgggagggtggttgggtggccctgaacttgggggtgcacagttagtgtccccactggctggcaagcaggctggaaagaagcctgaggccagaaaggcttccaggggacatggccccagaagactggggaatcagagagacagtcctcgggggtgtcggccgatgacagaggataaaagatgaaagatggagcccggcacctgcccgcgttgtgccagccaacactgtccctgcccctccactggcccataggccaccagctggcccattgtccccagtgagagagcagacactggagggggctcccttgtgggcaggggctcactcatgtacgcctgcctggcagggactgccagggcagagccaccccgggctcaggggcgaggaggaaagaagtgggggtggccaagagacagagcgtggagactgagtgggaggcccggccagagtccgggaggctgccctccaccttcagagtggagaacagagccctgctgtgctgcagtcaggtcccctcctgtggtgttggcagtgggcagtgtgcggggcctgcgaacaggagataaagaattcaggcagagtgttttttctcactaaccgtggatttgtgtatttgttcagctggtggctctgataagccccattctgccagataaaagcagagcagccacgaggcagggcctggggaggggcatcctaaaggggccttcctcctttctgtcccaaatcccagggttatcccctcccccggggaagcccagacagggaaggcagtcacgacatggagatgctctgcagctcctgtcacctgtccagagcaggtgtagacctcaaggcaaggctccccaaagagcctgccaggtaagaaagctggcccacgttgtgcctctggtgggcaggacgtctccttgcctccccaggagctgcctccccaggagccctttcaccatggacctagtggcctctctgggccctgcagccactggctggttcctgccagcctccttcctctatctatccaaggcacatccccgagctgacagggtgctcagagaccttcccccgtcacatccctggtgtcccgaggtgcctgcggccctatcggggcaggggtctactcttgctgagctagttaaggccctggctagagatggcctgtgaggactttagccacctttgagtagagctgcggtgtcccctgcccctggcttcagccttccctgctcctttcactgtgctggccagcggggagaaggagaacaccacttgagcagatcagtggggccctggctgcagctgccccggccgcaggcctggctcctgtgcctctgagcctgggtccagatttcccatgtctctgccttttgtcctggagctgagctgagcatgtcaggggccggcggtcgcggcattgtgggcctccggctgaggccgccagccgtaagatggctgccaaggtctaaaatggctgccagcagcgcccggagcagcgcccggaggcgcgtggcaggggctgcactcgcaccggatccttgctcccacttgctcctttacacagagctaatagtaataacagcaataacgttttggggctgtgtcctgatttagaaggatttcctgtctgtcgcgctctcctggagccctatttgtctctgcctcagtcgctggcccacctccatctctttgtcgggttccctctcggctgtccctgggctgggtacgcgcatgcgcatccacacgcgtgtgcacgggcacatgacttgccatctccacttggtctttcgcagtgggtaggggccgctcccatggggtggactgtgaagcttcctccttcttcccctgattccactgatccagctctggagggcttggtggggaccaagttgtccctaggatgagtggggttcatagcagagagacccctgggcagcagagtggggaccacgtgaccctcgctgagctctgcacatgggtcctgaggttgtgcccttcctgagccatgatttagagcaaccacaggactggggtctgaggaggccctggggtgggctgcctgctccgtagacctcttggctgtcactcccggactggctggggctcaaatcagacccagaaacccagcaatgggccaaggtgaaagagtgaggtagtatcaagaaagttcacattcacaccatgctatggcacagagaggctgccctctcagggaacatgggtaggcttcctccagagcagagagtgccactaacaaagagatggctcagggtgggaacctcttttgccaaacacaccaccagggctgagcgaaaggggaggtatggaaggatacaccccaaaccagaggtggtgaagtatatccttccatattaaaagcacttgttagcactttccgtattaaaaagaactactttttcttgactcgctacaatagtatttattttttggaattaaaaaatcaaaagttaagtggggatggggtggaggggaagtggagcctgaaacagtcacccttttttacccattacactaaggcaggcagcctggagcatggccagtgctttcagccccagacatggtggggccctcatgctgcaagcaggggtgccacccgggtgggctgcatcctgccctccagccccagaacccagctctgttccttgcctcccaagtgactgatggggtccctcaccccaaccctagggctgatgtcaccttttgtgaacctcctttatggtgggggccagcaggttgaatcagggtggtggcgagacccaggaggcaggaatgctctttaaagtcgggcaaagccctggccaataccaaggcacgtttttcagatgccacccccatgtggtccccctgtgagcagctgattcttcaccaaatgcctggcttcctcctgccccacaacctgcctggcccccctccaccaccctctcgccagctgtcatgcccaggcaggcattctggaggtccccgttgtgcccctggcacacaaagctttgaggaccagggggaccagggtggggggctttcccaagctcagcaaaatattcacacacacactccaccctgcccccagccctctgtgagctcccactgcacaatgagcccttgtctcggggctccctctgagcagctgtggcaccggggcatgagacagcccagacaggctggcacagagcgggcgacagcgtcagggcagacctcccccctctgggttgccaggcactgcctctgagcataaaggtgaggtgggggaggcgcaggcagacaggaatggcttcaattaaccaagttagggaaggggatgctcctctgggagctggagctgggtgggggatgggggacccttgggtctgtccccgctgtggagagagatggtctctgacttctctcttgggacccctctttgctcctgactcttggccggtgcttcttacctgagggtgactttgcccttaagggcacagtggacaatgtcttgggacagtttgggttgtcacaactggggtgctactgtcatctagtgggtggaggccagggatgctgctcagataccccacagtgcacaggatggtccccaccagagagagcaatccaggccaaatgtcagcagtgctgaggctgagaaacctgcactgggcctgtctttccttctctgctttgggtctcccggagcctcctggggctggtttggggagagggtggggtgaaggtttctgtagccagggtgggccgtccctgctcttgcaccaggctggaggggccaatgcttggctggtgcttatggggaactttgctcctgatacattctccccttttgtgtctcctgcagaatccggacaatcagatagttcaaaccagcaaggagatgcggacatcaaaccactgcccaacggtcagtgccccccacctgcccagctgcccttatccttcatgcccctccacttccttcccccaccctggctgccctggccaccctcacttcttccccttcattcagctgtcccttgactgagcttagcttgctgtcctgaggggatgggggcacacctagaggatcccccctgttcggtgtagacctgagggctagcctggagctggaaacgggacttgggagggagaagcaacagtgtggaagacctttggaaatagccaggcagcccccttctggccttgtcttgactcactcatcctttcccctcttcagggcacttaagtttccaggactgttttgtgacttccggggtctggaatgtgacggagctggtgagagtatcacagagtaagtgagtccttccttccaggccagggatggggattgaaagtgaggaggtgggacctcatgggatgtcctcctaatggggtcttagggcaggtggatgggaacagatgctttctgggacactctcggcttcactggtgctgggctgggtacaatagagtcttccagagaggcctgtctccagtctccattgctttggaggaaaaagaaaaagtcacaaccaaaggctcttctgtgacccactagctgggaggaggttcctcagcagcccagatggcccactttctcccatctcctggccccacagtaaactcaccctgggcttctgggaagctgttcatgacaaagaaacagaccccatcaggcctccccccacctccaaacctcatcaccctctcgttcttcccagctcctgttgcaacagcatcagggcccaacttctccctggcggacctggagagtcccagctactacaacatcaaccaggtgaccctggggcggcggtccatcacctcccctccttccaccaggtaagcccagtggccctgcctttccatcttctctccactccccccagggccagggccgtcccagtggctatagtcagctgtgtcactgaggctagggtgcttcagaatgtcacctctctcattgagggcactggctctaacactttagagtccaccatgcgcagtcacccactgagctgctttgtgctgtcatgaaggacccagccctggggacacaaactcgcacaaggcatcgctttgcctggaagtgggagtccaagaaggtctctgtcttggggaggtgacatttgagcccagacacagagggggttgttggggggtatggggaaaatgttccaggagaagagggtagcctgtatcccagttcagcctgcacaggctggcggggcaccctgcagagggctttggaggccagaagaaggcatttagacttcatccctgggtagtggggacccctgaggggttttaagcaggggatgctgagggtgtgtgttccagaaagctctctccagcaacagtgtgtgtgggcgggactgatagccagttaggaggccattggaaaggctagagtgggggagggcctggagggtggggtggatggagagggagggagctgcttgggaggcagggatgtgggttctggccagggcaagttgtgctgggcagggtccactccactttttttttttttttaaaacgggtgtttatattaattgcgagatttttggcattcattttgattttttaaaaatatgggactaggccaggctcggtggctcacgcctgtaatcccagcactttgggaggccgagatgggcggatcacgaggtcaggagattgagaccatcctggctaacacggtgaaaccccatctctactaaaaaatacaaaaaattagccaggcgtggtggtgggcacctgtagtcccagctacttgggaggctgaggcaggagaaaggtgtgaacccaggaggcggagcttgcagtgagctgagatcacgccactgcactccagcctgggtgacagagcgagactccatctaaaaaaaaaaaaaaaaaaaaaggaactaaaatattctttatattgatgactgagttttatggcatttttgtccccctgacatttttgtccctctgacatttttgtccctgtgagtacgtcattcacctcaccctagccctgggggctgccaggaaatcataggtgggatacaggaggcagctgagggttttgccgacttctctgatgtgggcagcttggaggaccgtggcatcacagattgggaaggggcttgaggaagaggagcaggttgaagctgatggcttgaggggccctagggctgatcttggggttgggcacgcagtgagtgcccagaaatgctgctgtcggccggcaccactccccacccagagggccatctatgcacagttctttagcctggactcttggtcactccctggagcctcagcccatccttggcccatgtgaccctttctttcttccccagcaccaccaagcgccccaagtccatcgatgacagtgagatggagagccctgttgatgacgtgttctatcccgggacaggccgttccccagcagctggcagcagccagtccagcgggtggcccaacgatgtggatgcaggtatgggtgcgggggatcctgacccagagcaagggcagcccagagtctttttgtccccttctcagttcacctggtgagcctcccaccagttgtccccctgtcggggggcattacccatctgttttcttgcctcctgatcttccagggagggcagagcaggctgaaggaagggagtggaggtgagggtgaggaggggtgctgtgagagtcagcagcagagcccgtggtatggcggtgggaagcagagggggtgccaagcctctggtgccccacagtgggatggccgcagcccctcctggtatttctctagaggttgccccaccccgtggcctcatggttgaaagcagtttctcaccctgggggctcatcattctgtgtaggggattgttctgtgcatggcaggatgtttagcagcatccctggcctccacctacaagatgccagcagcaaaacccccacccccagttttgatgaccaaaaacgcctccagacattgtcagacgttccctagtgggatggaatcctcccaggatgagaaccactggtctcaagggcccagcttcacagagagaggctcagagtctagtgaagaatgagcagagtccttttgagaccaggtagggaagctagcgaaggggagagagtacagaggaagccagctcagaccttcccagtctcctctagggatcttcttcttgttgaacccaccccccttcacctccattcttgactgagggtgcagacagacctagagaggactctggaagacagcatgtaacacgtgcgtgtgtgtgtgtgcatgtgcatgagcacatgtgtgtgaggaggctggccgcaagagtcccccgctgacgtgccagtggtacagcccgtgtttatcctcactgtgggtgtgacagggcctgggagtgcagactcacgcgtgtgggttgtgcacagggcatggctgctctggacaggcctgggccctgggcatcattctcctcctccaaaaggtgagggtctgacctaatggtactttgtctgatgttttccagatatgcccctactgggaagggccaagtgggcaggcagagtctggggtggagcgaggtggggctgggaagcactcctgcttttctgctgccccagaacgaatgcaagttctggcagcttctcctcctcctgggaggaggaaaggagggctcgcctccaggcctcaggctgagggagtgggctggagaccctctagatggccagcagaggctggcctctgtgagaaggcttccttgcgtgactctggggcccctcccaggctctcctcgtggcaggcagggacttgggccagcatgggccacatgcttccctaggggagccttgagaggcagagagaggagttgagaaggcccgggagactcttgggctacatcctgggtccctggccggggcctcagtaggtgaccccttctgcaaggactgcccctggggtgcatagaggactgtgtctgcagctggctcctggggcaagggctcctgggctcctgtgcccagacctaattcctgaggagcccccctcttcctggctcctgctctctcctttcttggctgtctgcttttgcgcctgccatttctgcatttctgctccttccggcagtcctgccacgcacggcccctcaacatcctcctgcagcaccctccggctcccttttcccctcaccccgctgtgtgttgttttcatgggctgcaacaaattgccaattaagcagcccagctgcaggacagggaacagctggggaggcactgtgcggccatggggacagctgtgcacagctggtaggatgctcccccctccccactgtgccagctatcaggtggcacacagctgctgccagataacacctccgctggcggctgggagttcgcccttcccccgccccttccctctgcagttaagatggctctttatttctctgttctgcagcccctccacccctcacccaaactgacttgatttgtcctccaagggtggcagctgtgagatctgccccaactctaccttatccttcccagcctgggcacaaccttaaagctcagcccaagatgggagctgatctttccagaagaacctggccccctgggggccctgctttgtcatttggatgctatggccactgggcagagatgaatttctaaagacagacttcaaacaaggtgttctctgtgcccttgtttcatgctgaatgccacccacacctctggcaccagaagcagggcagagccctgaaattatccatcctatggcagctgagcttctgggtcccctggctgggggagtcttctcccctctggctctgcctgcacagcccggctaggcctgagcagcccaaggactctccaggtcctctggcctctgtccctgctctctcgctgggcattgtgtccctcctgagggctcatggctgtgtgctcccttccctaaacggggccctggcttcttcccaccagaacctcccatggccccgggcaccatggcatagaccccagcctgtccctcccaaacttaccccttcccggctctcaagctggcgccctggggttcctcctgcactcctttcccaatgttggtcctgcatcccaccctttcacttcattacctgcttgccagggcataggctggggcccttgctcaccccctgcctggcacacaccaccccacattacccaggggcctcgttttcctctctggttagaagcaccccttggctggcctacacacagggcctcggaaccaggcctagaacaaggcctgggactgggcaaggagcagcaggagggagcacagtggaggaaggggcagtggggaggggctgaggagagaaggagcgagctgctggcttcccgccttccccgcacccaccccagcccagctaaacctgccctgtgttgctgcttcctccccccaggcccggcttctctaaagaagtcaggaaagctggacttctgcagtgccctctcctctcagggcagctccccgcgcatggctttcacccaccacccgctgcctgtgcttgctggagtcagaccaggtgagaaatggggggccccggaggggggcagttggggaggtggctgagtatctaggggcagctggccaggtgaaggggccagagctgaccccgagtgacagccccacgctctccaagtgggccaaggtgcagcagcgggtgggcatgggagccggcccctgcttcacgtagcacctcatcgaggaccaggccgggcccctgggctgcccacctggctcctgagcaacctcccacttctcactcctcacgtgcatgggtgctacatacaacacaagcctgtcccgagtcctccccaactctggcccagttctccttttgtcctgccagctgtgagcgggaaggcacagccttctgctctgccttcctgccggctcctctctcccagctcctggctgagcccaggctctggatttttgccagcatgagcccaggttgatgtggggcctggatggagaagagtactcctaaggagcccaggctcctgcggcaagtagctaccttgtctgggcctccctgccgctttctagaaaggaagggctgggtctaggggacaggtggtacctgggctgctccccaggaaaaggaactgcccactgccgtggggctgctctctgacttcagtgtcccagttgagaaggtgctcaggatgagaacacctagatcgccctgaggagataggatcaggcaggaggctgtgggagctgagacctcagccctgtcactccttcactttcttcttccctctctgggcacccacctggcagcaagaggcctggactttttctggatatggccctatgtccgcctgccatctcctgggctcgtatgtaggacacagaaaatgaggaggtttacctcctggcttcctccttggggcctcctggctgggagcccagaggcagccggtgctggggcagggtgtggtggccgcgaggtgggggtggggagcccaggccctctacacaggcagcaggagggcgcaggcctggctcctccggctccacctcagcttttatgaactccagagagaagccaagtttcctcagccccctaatgaaaccgagagcaagagcgagctgattggaaacagacgggaggaggaagagctggggcctgctctgggttgggaattgcgtgtgcaaggacgcgtatgtgaggacacgtgtgtgagtgatgaggctgagcacatgagaacaccgcctaggtggcggtggctgggtgcacaccagctcgcactcaggagatgtgtgtgcatatgtcagacggccatcctgagcagatgctggctttgtcttcatccagagccccagggaaccctctgcctcctcttgtcccccacccagtctcccacccagggcctgaattaaggcagggctagtgaggcactcaccttaggtgcagagtgtcagcaagtatcaaaaactcagtcatcaagataaataatattttaatggaatatgttttaaaatccaaactattgcaaaaaaaagggtatggtaagcaaacaccagtttttttgtttgtttttctttttcttttttcaaagacagtttcctgctctattactcaggctgaatgcagtggcacgattatagctcactgaagccttgaactcccagactcaagtgatccctcctgtgtgccaccctggctaatttttaaatgtttgttgtagagacggggtcttgttatgtttcccaggctgacctccaactcctggatcaagtgatcctcccaccttggcctcccaaagcactgggattacaggtatgagccacagcactcagccatgtctttgtttaaaatggtttaaaatgttgaggctgggcacagtggctcatgcttgtaatccctgtactttgggaggccaaggcaggaagactgcttgaggccaggagttcgaggctgcagcgagctgtgatcatgccactgcactacagcctggatgacagggcgagatcctgtctctatttaacagatactggctgggcgcggtgtctcacgcctgtaatcccagcactttgggaggctgaggtgggcggatcacaaggtcaggagatcgagaccattctggctaacacggtgaaaccctgtctctactaaaaatacaaaaaattagccgggcgtggtggtgggcgcctgtagtcccagctactcgggaggctgaggcaggagaatggcgtgaacccgggaggcagagcttgcagtgagctgagatcgcaccactgcactccagcctgggtgagagagcgagactcagtctcaaaaaaaaaaattctttaggctgggcacagtggctcatgcctgtaatcccagcactttgggaggccaaggcaggcagatcacttgagcccaggagtttgagattaaccaggacaatatggcaaaatctcatctctagaaaaaaaaaaaagcaaaaatctaccaggcctggtggcgtgcacctgtagtgctggttacttggggggctgaggtgggaggattgcatgagcccaggaggattgcttgccgtgatccgtgtttgtgccactgcactccagtctggatgacagagcgagaccctgtctcaaataataataataacacttttttaaaaagccaaataaaataaagacaagatcctaccctgcctcatctgcctcatcctaatctcccagcgctggttgtgatcaaactttatttacaaaaacaaatggctggcctttggaccctagtttgcctatttgattattattattattattatttttgtattgcattaaaacatcatggatcctgatgactgacttttttgtgccgccttaacttttgtgcctgtggcggctgccttacctgctcaggatcctcaggaccctctgaccggcagctcccctcctctcctgtccctcccactggctgcctccttggccctgacgcccttttttccctgcccacgtgcatgcagggagcccccgggccacagcatcagccctgcacttcccctccacgtccatcatccagcagtcgagcccgtatttcacgcacccgaccatccgctaccaccaccaccacgggcaggactcactgaaggagtttgtgcagtttgtgtgctcggatggctcgggccaggccaccggacaggtgagtccagagggccccaggagcccggctacagcctcatctccacatctatctgtctgtctcagggctcacagggagagggcccaaaagccaggagcccacctggggctggagcagcagggagctggtagtaccaaacgcctcgattttctgggtctggggacgggggtctgtgtattatgccagggcttgtctatcatggtccggagaggtgggggcagcatctgggcccccttgctcagtcaggctccttgcctttcccatggtccttgccccctcagcaggagtgaactcatgatgatccaacccggatctgggccctgacctcccagcgctcctcttaaacctcggggctgcaaggatttgctagattctagaccagggtttccccagtatcagcactgttgacatttggggctgtttattcactattgtgtgagaccatccagtgctctgtaggatgttgagcaatatccctggcctccacctgctagatgccaggagcacctcctcctccccagtcttgataataaaaaaaagtctccagatttcagtgtgcccaggaggggaagaccatccctagtgaggagcactgtgtcaagggaaagccccgatccacatagctgccacggagactcctgctggcaggacttttaacaaagggttcccaggacggtcctggttctagagtgaaaccctgctgctcctcagccctgggagacacactggctccccccagagcccttctctgtcactgacagaaactcagggttgctcagcgaaagaatgatcccaggaggtggtgggccagagatgacccttcagtgggacaacggtccctggttggaatgtggaggtttctagacctctgggaaaaatccagagcctcagcagcatgctgtaataggagaagctctagctcctctgtagccagccctcccagcttggaagcctgctgcgagaggtcaggcagggaggatgctcaaagggctgtggtggggaaaggcatcccggaagcccacaccagaggctgcctgctgccaccagccccgtgctgccttggtgtgctctggcagagcgagcatttgctaagtgctggtgtattgatttgcggcggggccgtggctccgcctcctcactctgtccctaagggaagccagtcctcttccctccctcctgttcccctcctgctcctttcctcctcgtctcccttctccctttgcccatcgagggtttctcttggctgactctgcagctccttagcatactggtagcttcgcccacctctctctggacaagctctgtccacttttagggccatggagggaagagcagacctgacctctgacagctgctgtgcttgcatcagagatgccagcagagttcacggggagctaccagcctatgcccagcccccaaggggcctggggtctgggatatgccgcagagaggcctggaacattaccttacctgctttcttaactaccgaggcagccaggatttggagtcaaattcaggctggcctagagaccggccaaggttaggccaaggagccaaacctaaccacagaacccttgagaaagtgggtcatttagtcccctggccattctgagcctctggtcctgagggctgggtcctgagcctctcccttgacttgactgttcaagattgaggactctgatatagagccatagtttttaaaaaaacgacagaggactcattttgcctagaagcttctcttcctgaggcaggcacttgctccaagcagaccatggacaaaacaccgcaaacaggcaccttgattaagcaaggagtgtggcccagctggggagcaacttctgagtttccttgtgtggcctgtgtggcctgttgtactgaagagagggagagggggctcagcggggagcctgcttgatggagcccacgcccggcttctgggaggaggctagagacagcactgtgctacacaagaggctgatgcatagctgcagagagccagagggcccggctccgccactgatccagtgggtagggagtggcagcgcccagctgtgcttgcactacagccactgttaagcagtgcttctcagacttggcatgcgcgagagtcaactagagccctggctaacacacagatggctgtgcctcacccccagagcatctgatgcagcaggtctggggtggggactaagaattagcatttttcccaactttctaggtgatgctgatgctgtttctaacctccttgagaatcagaagtcacagatcagttttgcaggaaaatgtctgcatagaagaattttaggctgggcgtggtggctcacacctgtaatcctagcactttgggaggctgaggcaggcagatgattgcctgagctcaggagttcgagaccagcctgggcaacacggtaaaacccctctctactaaaatacaaaaaattagctggacgtggtggcgtgtgcctgtagtcccagctacttgggaggctgaggcagaagaatcgcttgaacccgggaggcagaggttgcagtgagccaagattgcgccactgcactccagtctgggcgacagagtgagactctgtgtacaaaacaaaaacaaaaacaaaaaaaacccagaattttatagacaattgcagaagggttcccagggcacacctatagccatggccttggaccctagggtaataacagccaaggccatgtggagacactatgcagaggagatgcaaagggcagttaagaggatgcctggttagctgtgtttcagggagaaggaagagactgccaagtgaacatgatggagaaatcacagggcccaatgggagagcatgactccgggaggcaggatgcctggtcctggctcagtcttaccatcattgtctgaacagccaggcccacgtgtttatctgtaaggtgaaagtgaggagctggtcgggcgcggtggcttatacctgtaatcccagcactttgggaggctgaggtgggcggatcatctgaggttgggagttcgagaccagcctgaccaacatggagaaaccccgtctctactaaaaatacaaaaattagccgggcatgatggtgggtgcctgtaatcccagctacttgggaggctgaggcaggagaatcgcttgaacccgggaggcggaggttgcagtgagccgagattgcgccactgcactccagcctgggcgacagagtgagactccatctcaaaaaaaaaaaaaaaaaaaaaattgaggagctataccaccttccaggctccttctagctcctaactcctgaggttttaaggcactgcacagtcacaagaccttgaggtttttaaaacctcaactgtaccccagtcagagctgagacatgccagcctggttggaagttacatctagaaactgaatgttgtaaatcagcaggtttcaatgtctggccatatcaggcggggattagcattattgggtgggattaacgatttagatactcctcggggagacaggctctgaagctggaggaaggcagaggccgtcctgtggttgcttggaaggcctctgtgtcccagtcccctgggagcctgagctcgggacacctggagaggaggagtgaggctgtgatcagaccgtcccattccctccttctaggcaggcatggagatgaggggaggcgtcgcatcacctttctctgcagcgctgcaaacccccacgctctgacctgcactgttacctggaactgagggtccctttccaaaacacctgcacaaaagttctccagcccttgacacatatggggaccagcagccactgtttgcttttgtcaagggccactgagagttgtcacccttggagtgggcaggaatgggtcaaaggaaccatttagagggacagtgtgtcagacctagatgctggtcatcgtggtaaaaaaacagtgggcagagaagccagagttcagaagggcgtggctgcacaggccagcctgggcttccgtgactttaaagtgcagcaggaaggacaagtcgatcccacgtgcttagtggtacttgagtgctgcatgcttctgccgacttgttggggagctggcagggatgggggagtggcctgttttgaaggttccagtgagatcaagaatgtcctagagaaacagggcagagaaagataggttgtgattcaggggatctggctggtccccacagaggggacagcgttttttgagcaggtcttgaagggtgtgggaaatagtctttcatacagagagcttcgcagcaagccagcgtgcagtcctgcctgctcggcctgtgttccggaaaccccagtcagtttggaatgggaagtgcagaggggcggtaggggctggaccagtagaggcatccgtgggggccttgaatgcccaactgaggagattggacttcatgttgggtatagctggggccgtggaaggtttcagaggactggagaaacctgagctgatgtggatttgggggagaggattgatgagcctggtggaaagaatcctagcatccctggagtagtcaggcagacatggctgtgaattccaggtctggccagttgcagctgggtgacttaggataaaccatttaatggcccagagcctcagtttcctcagttgtgaaataaagagaatagagcttcctttgtggcaaggcttcccagggcaggcctgttaatgcttggactgatgatcctttgttgttggggctgtcctgtgcaccgcaggatgtcgaggagcatcctggcctccacccagcccctccagcctctttgttgtgacaactgaaagtgtctccagacattgccagtgtctccttgagggggacagaattacccctgggtgagaactgatgctttctggggtgggtcaggggttacacaacagaactaaagcacctggtccagggctggacactgagggtcctgagctgataagcacagtctcagcacaggggagccccatacaccagctcattgtcatcgtccagctgaaatctgtgaggacagaacgaggcactggctggagacatcaaggggatgggctcctcagggcttgctcaccgataggaggaggagcacacagcatcctctctgggtctcgcatccgggtgcccggaagggcggaactctatcccacaggagaggtgctggtttaggatgaagagcgcaggccaggccttcctgagcccacgctgcagtggtcatcagggtcctgttcagagcagcaggaggtgtgtgcccaaacctccagggaggtctctccaaggaacctgcctgggagaggcaggggcgcctctgtctgtcctttggcacctgtgtgtcctgaagccagaaggccaacccacgcaaggccatgcacagggcctggaggagaaaatccagttagaagcaaatgagggcataaaggacaaggaatgcatcctggcagccgagcatccatggcgtctgagggcgttgtacagggaagtcctcctgaagaacctcacgggcactagagctggcagcgatggattttcttccctggccattcttgagagaacaggtcagcaccctaccacccacaggcagtgaggacccaggctgctggagccgaggacgagctccccaacttctggtggcctcctgaggacatgttgtggggtgggtgctggcaggcctgccgtccttggttaggtgaaccagctcagcccgacagccctcagagggaggcaggcatgtgctttggggagccgggggagcagggtgagcgcgctcatctttcctgctgtaggagatggtcttcaggagtgtgagagttctaggtacagctgcacgtatttgctaggtggcacattttggtacctaaaacattttccctaagaagtaacaaaccacccgtcgaacaccccctccctccctcccacaacttcaaaagaggaccaaaaaaaaaaaaaaaaaaaaaaaagagaaacacctgagagaccaaatagaggccttacaccctcacccatcctgtgccctggaggagaggacccaatcctggatcttccaccgggagcgcccgctctcaggagcgagctggcgcggccgcgcaggggagcgtgtgtctgtgtgtgatgtgccttcatgcgtcactctatttatgttgttcgcagcccaacggtagcggccagggcaaagtcccggggtcatttttgctaccgccgccgcctccagtggccagacctgtgccccttcctatgcctgattccaaatccaccagcactgccccagacggcgccgccttgactcctccatcaccttgtaagtggacgatgaaaccgaaaccacaacgcccagcgtccccggcccgtccaaacagtctccactgcaaaaagaaaagccttccccctccccaccaccaaagccccccaacccagagcaccatggacaagagcagagccgagccccccaaccacagcctccctcccgggcctcagtcgcaccagccagcaccccacgagccccctgcccgctgctcccagccggggcccctggcccaggcccctctggggggcgggagggagagcacagctggggcgcgcaggccaggggtgctggcgggggtgggagggggcggggaggcacagccatgccatcttcatgcctgattgctgtttttttttttttgttttttgtttttgttttttaatttttttgttgtttcgttgttccccccacaccaagaaaatcaaatgtaaccacaaggcgacgccaccaccatcccctttttgccttgcccctcacctccatccctgggcccttgggcctcaaagacgcagcaggccagcccgaccccttccccctcagtctcacatttggtttctcgttgttcctctttttttttcccccccttccatccctctcccgtcccttctccgcaattcctttcccaggttagatgttccaaggacgagggagggctgtgggctttggcttacttcatctctctctctgtctctctttcttttcttttcttttctttttttttcctcttaaaccaatgacaaattttgtcaaagggaaaagaagaaaaatcattcgagaggtcccaggtagacccggcgtgaaggacaggaggatggggcgggtgctgtctgtgggccagggtgggcagctctgggggtgggcaggccacaggccagggcagttcggtggcggtgggaggggtggcccatctcacactgctctccgctcgctttgtctctcctcctttctcgtggtttgagttcttttcccctctccatcctcttcatgccatcttcccatctgcatccaccataagacatgaagtcacagtcattggaggtgggcagggtgggggatgggagctgggctacagggttcgggggccacttctggagagaggtgggcagaatctggtgagcatggagtccctgggtgtgtctggtgcagggcagcggcgggccttccaggtaacctgtgacactccttgcctcctctgggggcatcttcccttctgggggtgcagggcctgttccctccagcagggctccatctggacaacctgagaggaactcagggctgttgagatcattttgtctttgggccccaggatggctgctcccaggcatctgagccctagggctctgccaggctctccagcctcctcctcctctattgccttggtcctggaaccacaggcctgttggacctggtgcatcagtcagaggaggagaatgccataggcctgagccttgccaccccctgggcccaagccaggcagccagctcctaggcccttctctgaccctgccctacctggctcagacctccattgggcaccctttgggttccccaagcctgcctgcctggtccttgggcctgcccagagtggtaagaggtgtagcatctagctaggccacccaggttggagaggtagcctggctgggaaggccttcccgaagcagggtggggccggactgccaaagcctccaccctcccctggccccctctcttcagtacctgagaggggccagtgggaaagcagggttatccactgagggtacctggggaccagggctatccccagccctgcccagtgcctcactagcgggtggaactgggtccaggagacttgtctcagcctccagggcctctccctcatcccagctgtgaaaaaggatgcctggctgagactgtggcttctgagtgggtgtgtgtcgggggtgtagtgtgtgttcctggtcagtgagaggatgagggtgtccctctgtagtggggggcaggctcggagcctggccttcagctcagatgcccctctggcccatccttcccactgccagcctaaactcgggcagcatggtctaactcagtctctccctctctcagcagccccgaggggcagtgcccaggtgggccccaaggcctgacagggtctctccctctctcccctgctccccacagcattcgcaacgacaggcgcctcctctgccaaccggtttgtcagcatcggaccccgggacggcaactttctgaacatcccacagcagtctcaggtaggagaccctgcccaccacctggatgcagggaccaggggagtagtcagggttggggggcatcttggtgttagggaagagcctggagtccttggggctaacagggagagagaggtctgaggtggggctggagggcccaggcttttgcacgcccagctgagcctgtctccccaggcagcccccaggctccctggctaatcagctaattggataattagctctgacagccctggccctggggaaggcggccaaggacccaagtctagaggccctctgggccaggcctggtagaagcaaagatggaagcctgaggcccatcgggaggagaatagagtctgcctcactgctttcacctgccccgactggaagccccggcccctagccctcccctttcccctggcgttgggtgggctgggtgacgggtggaggagggacagagggcctggtgggctgcgtgcccagaactggcactgagggcagggcagggcaggccgccaccctagaggcccctcacccaagtctccaggagtcctgttagggagaaggccagcatgctggagacctcatccttgctcctatcccctgctgacaccacccttagttctcaccaggagacagatccccgtcacaagcagggcataagactactcttagccctccaggtggagaccccagaggccagtgcccacagagcccagtgcccttgggggcacagggaagacccatctcaggaggaggacagaggcagctttagggggcctgaggcttttaccacccagggttttgaaaaagaacatgcaaagatctttcttttgcacattttacaaaaacaccaccttggaggtgtcctcagcccggggaaatccacctctctcaagagcccctggggccacctctcatctcctgctctgcctctgttctggggcctgagtccagagaaagttggtggatggaagttgtgtgtgtggtttgagattgtttttttttttttcttttcctttccttccctcaaaaaaaaaaaaaaaaaaaagccaaaaaactttgtcaaacttcaaacttcagagctccctagtggcaaggaggggaggggaagagaacttcaaccccctccagcttcccaccccctttccccagagtcacgtctgacccgtctggtttccaggagcaaccagacatgatgtaacacccagatgaacttgaacttgggggtgctgagaagaaaaacaatggctccgagcaggggctggagccagccccctctgctctgtgccagggaggccgagagagccctgctggcagaggcgggagggggtgcgagaggaagggacagcaggcgggcctcccctcccagctctgggctggcaccaggcttcagggttccatcgctccctccctcctgctgcctgcctgggctgctcacagctctgcggtcgtgcgctccgaggaccactgccacgagccgtccctgctaaccctgtttccgctgcctcctttactttctttgctcactttgcttggacgtttgggggccaagtcagagtttagggaaagtttgtctccccccatgttccctgtgtcttaggctccaggaggtaggaggaaggagtcccagcgggggtccagggcccctgagcaggcaggtgtgtctgggagtggttgggggagcggaagctggacaagcggagctggagccctcgggcctgggggcaggcaggcggctgcaacgggcgggcgcagggggtacagccgggggtggtttccacagtaaccagtgactttagctgatctctggagcaccagatggagagagaacaatagaatgagggaagaaaagagaattttagcaattttgtcattccctgggcagcgctttttacttagttttaatcaattttggacctggctcaggaagtagggaggggtgagcagagaaagccactctgtgcttggcagcagatcccccatttctgggacctgtggggaggtgccggggagcccccttggggcagcctttgtccctaactccagacctggaaccagagtcttccttccctgaggaggaccccccagtctgagcattggcagttgtccccaactgtacagctcaggagaccccaaaggggccagtgtgaggccctggcatgatctgccaggagcagatagggcaggtggggccctccctgtcctattgtccacaagcctcatttgcctggtgaggagaggggtgggcttaccaccagagtcagcctccccctcaacctcggggcaatggcacagggttcctgtatagtctccccttgggaagggggtcccagggaacaggcccaagcctgtggcaggtgggggtcacccagcccaggcgcttcccacccccgggcctgggccagaagcccaggagctggctgcgggccggttctcccccacccactctggggatgcctcaggcctgggtttccgccttagcctcgccaggccccaatgagcctctgtttggcctgtagtcaattgaccggttggacttggggcaggtgctcgaggagccccactgagggagggcaggtctcttgtgcgtactgtccagcacatacaggaaatttagcatttctgcccacccagcagcgcctgctcattgtggcaatcccaaaccgccacatttccagatgctcttgatctgcactgtccattgtggtagccacgggccacgtgtggctgtttacatttaaattattaactaaagaaaaatttagttcctcagttacagtagccacatttcaagtgcttagaaaccacttgtggctagtggctactgcaatggaaatgagaacatttccattgtcacagaaagtgctagatgatctccaaggccctttctgaaactcagtgtccctatcctcagtcccaaaccagagcctgagagcaggtctggcctgcaggcagaatgtttgaccaaagcaatgttttaaatattggaaattttcacacgaaattctgtttgggcttctggcttcttttgaaaagttggcagatgagctgccctgggccctcaccctgaccctaggcagggcacaggcattctggccaccacagaccctgcttcctcgtgctcgcagcacaggcagcagttaggagcacagcctgcactgccccttacatttgaaccctggctctgttgcccgagggctgtgtggcctcaggcaggtcacgtaccccctctgtgcctagcttcctggtggggtcagggcaggggtggagtgaaccaggacctggtatgtgctctgtagttggctccgcctggcccctgcagaccagagtctgtgacagcctgggagaggtcccaagatgcattttcagggaccctcattttgccccaacggtactaccaggtgcacccaggcccagtagaccacagtagaccctgacccaccactttgccaggaggtggggctggagccttggatggagggcgtagccaagcagcccagacccttggggtctgccctgggtgtgctctgagctgagccaccagacacaggcagacaagacaaggccctgtctgtgggaaggcagcgccccctgctggcgatatgaaggaaatgacgctcaccccagggagcctcaagtccttcctcaatgtctggtgccctgagggtagaggatccagcaccatgggctacgtggcccctcccccaggcctggcgctactagggactgaagctgtgtggttcccctgcccccagtctttcagcctgtgggaccttggctggggtatatagatgggaatttctgcttttaatccaaagagacagaaagaaaactcagcaagaagctgggccacccccaacccattcctaaaacccctctgggtacaaaagccccagcctggcatcttccccaccctccaggacccacacaaaaacctaaacaattggaaacatggccagatctcaggcctgtgccagcgccagccatgggggtcccacccgctgggcacagtgcccacgggaaggccagctggactctagcactaggggcagagtctctgagggggcggggttctcgcaggagggagggagagaatggggatgccctttcttctccatgggaacaaggtgggtggtggctgcccggcaccctggctctttgggagctggacccttgaggggccaggtcactgggccaggtaggagtgagatgggacctgccccagctgttctcagtatcgcctctttttcatcctgtttcagtcctggttcctctgataagatcgacaaaagaaacaacaaaatgagaagaagaggttcctcgaaaggggggagaagaaattttgagaatggaaaaatcccccagcccagcccagccccaccgaaaagcaaaaattacacgtcgtcagccactcagcccttctctcctccagcccggggacccccgcgggccccagaagcagcccagttctcagagagcccttggaaggggtctcggtggagctgtgcaccagcagccaagcagaaagaaacacgcgacatggactctgtcaagtagaggacagaaagcaagaaaggatgcagaactgccttcctccccctgaccccgccccggccttctggggaaggaacaaagtccccaaacaaagcaaccagcacaattctgaaggggcctggcctccaccctcaccccttcctaggggaaccccaccctccacacagccggagctgccctagggagcctggagggccagcttgtaaagatgatggggtttagatccctcaggctctcccctccagactccgcccttccctccctccctccctccctccctctctgccaaggctccagcttcttcccccagctgctcccgaccaggagggggagagcagcctccacttaccccaccccacccttgggctaaaagcccccaggcgggcagggggtgacccctggagctagttgcgtgtcccagaatggagggtgttctgacaccccaccctgagccgcaagagcagtcctggggccctggacccctctgtacagtccgtaggaaaaagtcggaatgctctcgacggcctcgtcccagcctgggacaggccccctttcccctctctctgcaggccaggagggcctccttcctgccacgagggaggggagtcgggccccaggtcgcccccgcccccagccctgcatgcaggtgccctcgctccgccccatcagttcctgcccctgcccctcatgcagactgccctgctggggccgggccggagggtggagcagaaaggggaccccggagccgagcgaggaggaccaggcagccgccgctgccgcgctaagccaccacctgcgcttaggtaggcgtcctgctcgccgactttcagttccttgggagggtgttgggtgtcgtccttttcaaaagtgttttggagctttctgtgccccccgactttcccccgcctccccgccccccacgtggccacttttctctggattttagctgtaatgtctttactctttatttaggggtggggcattcattgtttgggtcttttgctgttggaatgggaactcctcctccatttgagcaacttgggaacaatttggtaacacaccacaggaagtagctctcccccccagccccctcctccctcaagggagggttggggggcctgtccagagggtcttcagaagcccccctgggagggaggggaggatgagcacgcccagctcccctccagggtgtgacttggcccctctggcttgtctttctgtgccttactcctcctcctgcgtctcccgttcctggccccttcttgagtccttgtgcctctctctttctctctctttcttaattgtatgaaaacacaaagcacaggtcaggatcctctgagagaaaatcaacattgcaccacgtaggggtgggctatgggctgtatttattgtgaatctagtttgtgaggctgtggccccgagctggcggagggagggaagaggagggagtgacgggaggggaggaggtcagcgacctggggccgtagcggcaggcgaacggtgcctgctacccagctggaagccacaaggtggctggctccaggggcggcttttgttggaagttgagtgaagccctccccctgtcctcagcgtgcagccctagaggaccccagggctgaggggcagtggatcctgcgggagtctcccggggcgtggggagtaaggccccgggggtggggggccgggtgggccgggcgtgacgcgcggtcaaagtgcaatgatttttcagttcggttggctaaacagggtcagagctgagagcgaagcagaaggggctccctgtccggcccacgtgccctttccctcgacgacagtcgagggctcgggctctgtgggactgtgggagctagggtctgcggggcgcctgcccgggcgaggtcggaagctgcaggccagctgggcccgggccggagcgtgcccggcggggctgcccgggcgggcagggggtgggggctgctcctttcccaagtggtgttgtgaggggcaatgagggcaacaggagatgtggggacgtgttaggagagaaaaaaaaaaaaacaaaaatatatatgggggaaattaacttttttttttcattgaaccaagtgcaatgcatcagagagttttcctatctttgtatgttaagagattaagaaaaaaaaattctatttttgttgtaatgtcctcgcggctctggggacgctaaaagaaccgggcctgccccgccctgcgcggggataacgaaagctgagtgtttttcccttttttttgttcgtttttagtttttttttttttaagtcgttttcctgcgttgacgaggatgatctggggtttttatttgtttcgtcgttcgttctgtttcggtgggagggctgaaggaaacgttcacattttagagtttaaaaaaaacacctcgacatttaaaaaatcaaccaacacaagatcaaaaaggaaaaggacgagagaaaaattatttttaagataattaaacataaaaccctggtgcttcttacattataaagtacgttttaaagaacccacaaactattatacataagtttatgaatcaattaaatatcctgcacttgttaggaatacgcatatcccttctttgttgagtttaacggaacgggacagcggcgtgcccccggcggctggactgctccggccgcgggtctccccgggcgcccctccctggggcccagcacccctcctcgccccatccccgtccgggtacgggggcgcggcaggggtccccggcccctcccccgcagaggtcaatgccaacgaacaaacgtcccctccctccctccctctccgccccgagcgcccttctttgagccagacgccaacttgaccctcaccagcattatcaggagcgcgctcagcaagttggtagtttcctcccccctttcccggcgcccctcccgcccccattcaacatctctcatcctatccccgaccccctccggggaacaccgggaaggctcgacgctccaggacaggaccagccacgcagacaggtcgatttgcccaggcccgcgcccgcacgcacgcacgcacacggccccgcacacagccccgccccaccccgcaaccagccctgtcgactgccttatacacccgcccccgcgctggccggccgacctagtgccttgttctcacccccgtgctggcggagcggacgccgcgctctgggtcccagaggggccgggtggctcagacgacccaccactcccccaccctgaccgtgctgaacagacccccccacacgagagaaaataaaggagcaataaagtcacgagaactttcgtcccccaatcgagagcccgaggggcaccccagccccgcctctgctcccccccaccccacccaccctcggggcgcccccctccccccgcaagccagcctgggccagccccgcttcggcccctcccgggagatccgtgcgcccgaccagcaccagcatcgcggaccgcaaaggccgcccgtcccgtcaaacaagtttcttcttaggctaagaaacgcagtatatacgagtatctctatatatagtactaatggatttggtgtgcttcccccttagcgtccccctccctctgctcctcctccttcagcctggtctccccctcttctctgccctccacccccgtctctgcactgagatacataagaaacaagggtagtttactgtctgttttgttttctgggttttcagtgtcctagcggaatgcaagtaggcagccagcccgtctgttccctctccgccccgccccgccccgcccccgtcactgcgcttctgttataccatctttgcctgactctctccggcttctccattgaatggctaatgtgtatgtgaaataaagaaataaagaaaaacaaacgcgagagcgcctgacccttcgctaacgcgaccgtgcgggactgggtcggggtcggtagggtgcgtccccgacttggattctgcgcctctgtccaagcgccgggagcgcagcagacgccgtcgacgagcgtctgcccctgggtctcccggaggggccgacggtgagaaaagcgaagcctccccagcccctcctggcctccccccgcgaccccagcccggaaaaaatgaggcaccacttgggtcctatgactgctctgccatgttgctttgccgacctcgcccctgggaaggggaccgggcaaggccacttccagagggttgtgggtgatttttttaagggtctgcgggtcccttgggggtcgatgatcacccttccggacccccgagaccttgcccctgacgtcttcactggtccttcttcgggggagttcgctcccgaacatgcgcagcacgtccactgccctttccttgacggccctgggccgagtccctggtgccctccggctcagaggtgctgccgcgtgcggtcaccgcacctctgggctcaaagcggtttgctccatcttgatgggccgggccgctccaccggggctgccgtcggggtcggccgggggcgcgggctgcgagcgcgctgccgcctcggccctgcgtccggatccccggcgggcgccgtcgtctgggacccggtgcaccggccgtttgcgaggcccgggaggggtggggcctgcggccagagctgcggcttggtcgcgcagcagccgcaccaggaagccgatgtacttcatggctaggcggagcacctcgttcttgctcagcttccggtcgggcgggtgcgtcggcagcagcttcctcagctcggcgaaggcgccgttaacgttctgctgccgccagcgctcccggctgttggtgaacacgcgccgggccaccttctggggctggtgccctgtggacaaggagggccgggttggtgccatggcccaaagggcggcccctcctgccctcccgctagacacgcagcaccctcgtgggaacttaaacccaggccatgggctggggctttctccacccaaggggtccacgggcagctctccccacccctcccaagagccatccagacaagaatcatcacaggcccggcctacggacaagggcctgctgtatctgtgactatgggcacctttatgtcaatgactgagattccctaaagaaagatttccttgtgtttgtttggtctgggaagctgtccgtggggccctcattctgattgtgcccaagtacggctggctgggtgtactcatgggtctgagaggtcctctcattatgactgtctgtgtcctgtgtcttgtatgactgtgtgagactcttgttatgtctcatggctgtggttatgtgtgatgttgccatgtggctgtttcacgagtggctgtggttgtgtggctgactcttgtgtggccgtggtcctaagtggctgtggtcctgtggctgtcttgtgtgtggttgtggtc

SEQ ID NO: 399 - DNA, 153487 bp, Homo sapiens
  source 1..153487: mol_type = genomic DNA
gctttcaagctgaggtcacgctattctcaagacaggaggggttggtggccaatgatttcactaaattatggaaattgagagcatgcttttctgagggggccctcttgccaaagaccaagcaaggccatggtacaaggacctaactgtttcagtccaacacaggactcctccaatgagtgacctttttcccagagttcccctgggatggcagctcgcctgctctccctgcctcgtcctgcttcctcttttcctttcaaaggtgcttactccaataataaatcctttggtattctaactgtctacttcttgaagaatctaaactggcagtaggatcatgcccctcactgatagctcaaccacgttttctatctttgggcctccttgtctttacctagcacatgagaagcatttattaggactttttttcccccattgctgaacaaatgactacagattgctctacctcttgttctgtgaataaaggctggccgctgtggaaggtaggtcagagcaggcaactgagagaaactgtattacagttaccgagtggcttattaaggaaagtggcgcaacaatcaggtccatgtttcattcaaatgaccctccattcccccaacaacatcctcacatctgccaaagcaaattatgctgctgtgctcatttgatgatggaatcagcatcgcatgcaggctgaacccctactacggcagaaccaagaaagccactctttcccctctcctcctaagatgccaccacagagcagggtgccagtggtgggtggggagaaagacggagacacagaaacgtctccttttcactgtgattctcctaaggaatatacagtcacccccacaggaaaagcaagagttcaatcaagattcttcagaaatagtaggatggcagaaagcagatcgcattgaggttgtttccaactgacagaccaagcagtaatttgtttctctccccactgatagtaaaaataaagtggaaataatttagggctggggcttctgtgattatctggaacttaaagtatgagggtatgagagccatcagatctacccctgtggagctttttaagatgcggtccataacagaagcgggccccaaggagtagagtagccacatggaaggtgccatgtttcagggatgagtctcgattcttctctccctgtatttcatccatgcctgtaagaagttctcacgtctctccacatgccacgtcatctgaaccgccaggcgataggttattcgtattttattccaaagtccataggacacgatgtggacttgtttttccacgtgcccttgtagatggtgccatccagtgtctgtgatgttccacctcctctgttgggttgtcacctcccccagagaccttctggtctcactgcttttctgtttgtatccagcaaaacactcaacaattctgtataagaacacctatctcattattcaaaaaaaatgcatgtataaacaaaaagaaatatttcaaatatttactttacaattgttttattcaaaggaaattaaatacaaatgtatatttttcattaaaaatggggatttaaaaatagttttataattagtgttatgttgctttatcttatctttgcataaattatgtattattaaaggtttctgatatccatatacattctagtcttttttaggcagctatgagaagatttcatattcaaaagccaatgccacttttctaaagaaacgatctttgtgccaaattagtagacaattgctccaaatctctggtcttgacttccggttgtgtgaagagcagtgttttgtttttttcagagaagggaaagagccttcattctttaggtttgtttttgcctcaaagacatttctatatgggtatctaaagttttagtttataagtctcataatgatttgacccatgcagtccaacttttagatagtatttccataccccccaaaagctggcaggtggtagtcgcactagattcagaccaagactctccgcattgtcatcctaggtccttctaatgaagaagacaatactctagtttatttaacaaataaaggagtctaagtacatggaagttaagggagtaagggtgggggtaatgagattattacattaaaataaagacttcacacacgtgtgtcccatgtctaaaattgttgaaaatctgattggagaagattagaagtaattagcaactcaattatttataaacaaatataaaaatgcacaaaccaaatgatgcaaaaaaacctttttaatctaaaaattcatttcccagggctaattgatagccaggccctaccaatttttatcagtttatttgactaacaagagctattcagcattttcttcaaagtaagataatatataatagattttgataaatctttctgaattaggacatgatactgtaggcagttcaaggaaaaaaaaatagccataactttttctttggtgtaaccaaaaggatatccaaaagttagcaaatgttgacatttcaagtgacaggaaattgcctaatggaagtttaaactctggttaaaaaaaaaaaaaaaaaaaaactgttgtaaaaggaaaagctccacccatagttctgtagtgcaagttttcaaatttaattctgaaaaataattttatttcataggcaggaaacaaattccagcagtgtatcacttactcctttccaacccttcccctctctctatgtccacaccatcacttcagttgtcaatgacctcagctgctactcaaggaggaaattcattaaaaaattacccacacttctaaaaatcaggctacaattgtgtgtatgtggctgcacagcagcaggcaccaggttacagcattgccacttctacgtttgtcatttttacaaaaaagaagcaaagtctacctcccccagaaaaaagtacctgaaccaattagtcacttagccccttcccagcctctccgtgctcaccagacctgcctcacctcagcagcacacgtgtgcatatatctgtgtgttctgtgcattaagaaccagcaactctactgcctctttcttgaagtaacatcttctcctttcttacaaaactcgctgatttctataaacgtaattctctgaaagcaattaccgcctagaccagaggactccgttactctaccaagcttaagtctggcttgctttcttctatttctgtacatgttgtttgtgtatatgtgtattttttaaaaattaaaaagtgtggaaaatgcacacatacacacccagcatttagcaaaaaaaaaaaaaaaaaaaaaaaatcttccccgggaagcactttcagaagtttaagcttctacttgttcttaagccacagggcaagtgccaggtgagtcctaaataaccgttcactcacactgcagggctggcaaccccggggcccacagcacagaagcagagtgggctccccgggtgagccagggaagggcgcctagcaggcttcctagagtgctgcattgctcgtctccccccgtgtcacctgggagagttacgttcttggccctaactctcctcgctcagagaaccgccacactgtggggagggctctctgccctctgcactggctgtcccatccacagggccgggggcctggggctgcagggaggcggcaggcccctccccacagagcaggccgccctcgtccatctcctccctcgccagtccgtccagggaacatccctccgcagcgcccagagccccgcgggctatgctgtccacaggctccacggcttccccttctccctccgagatgacggtcatggggctgctctggatccggttccgcatgctgtacctgctgctggcggcagaaggcggcgttcggctgcggccgtacctggggccggaaaaggacagactccgaggcatcaagccttcgttcttggcccactcctcctgcgcccttctgttcttgcttggggagcagcttgacgggctctcgggggcatctggggaaggctctgacctcgacctctggaatctagggtctgtgttcttgagcatctctgctgcagacatgcgggcgctggtgtctgaacgactgccctttttcagcagcagagctttgaagttgtcactgctggtgctgctctttcggatgcttctctgaatcgaccccacttgctttggagaggccaggcttggggcagcgccggtgggtgtcacgggcggggagggagaatggtttcgggagtggtcatcatctgaatctctacggccgaggactttccttttggatctgagatttaataacattaagaaaaaggttaattcccacgggaccacaggctgtcagccacaaccactctgctcttatcgcatcttcaggtcaccatctacttaagattcactttcaaaaaatttatttttgactgggcacagtggctcacacctgtaatcccagcattttgggaggccacggtgggaggatcacttgagcttaggagttcgagaccagcctgggcaacacagtaagaccttatctctattcaaaaaaaaagaaaaagtaataaatgcataatttattttatttttttgagactcactctgtcgctcaggctggagtgcaatagcgcaatctcagctcattgcaacctctgcctcccggattcaagcgattctccctgcctcagcctcccaagtagctgggattacaggcacctgccaccatgcccagcccagctaatttttgtatttttagtagagacggggttttgccatgttgcccaggctggtctcaaactcctgacctcaggtgatctgcctgcctcggcctcccaaagtgctgggattataggcgtgagccactgtgcctggcaaataatttatttttaactttggaaaatttcaaacacccacacaaaagagaacagctcactgcaagaccgcatgagcccataactcacctatgataatcattaattacggtcacccttcttttgtctccaccctccctatttgaaacaaatcttagacactattaacttactttggacaggaccaaaagttttaataatggccagttttccttgatctctcctagacgggctgatccggagtgaatttcacatgctgaccctcctttctttctatgcttccttttcttgttccatgccagaatatcccctgtactaagatgtaccccactccaggtcctagaacaactcctcagcttcacattctcagttattctagaagttgccgtcagaccagtcttcctcagctcttccaggaccatgtgccaacttctaaaatccagccttccagaaaacaaaggcgaaccctccatgccagaccctgcttcatgatcgactcagcaaaccttgcactgatcaagaaaatgtgaggggtggggtggggtggggaagacgaaggggcaatcaaagaaagctgaaggtttcctgtaggtatttcttgtcctgagtctctgagaacctcactgttcaatgtgctttccattgccagtgacaaagagatgataaagccagtgagccaagtggccccttgctggtctcttcatgacaacaactcagtctgtgtctcttagctaagtgcaggagaacttgctttaaggaaactcaacacagttaatagaataaagacgtgggtatatctcttttcctgctataaaattgtagaatatgcagcagggaaaggttgagagtatgatatctgtacacacagattaagagttgaaaccagactcttcccacctctcgctgtgtgacctgggacaaattacccatgcatgccatgcctcctcacttataagataccaacctcacaggtttgtgaagattaagtgaaataaagaagctagctacataactcccactgctaaagcttccttgttctgtcaccttggacaagttaacatttctgactgtgtatttttcctatcaccaaaaggggaataacagtatataggtcacagtttgtcagtactcatgaatgcagtgatagccataattggtcaggcatagagcaggtgcttaacaaacctttgaatgtcacatagaaaatggatttagtttttacgtggcttacacagcaagacagagggcagcatgggcccatgctggctgccctgggcttggtgttcctggcgtcatctccattcttctggtcaaaaagatgccactaaagcagaggctgggaaatggtaaggacccaatacagggtctgaagggtggccagagtggacagggcaccagactctttgggactgcagaacatggcctaccatacaggtttcatggtcccactcagtagttaacaagagcagtctgccctgataagagttaggaccggctgacaaaactacagacatcctaacatctcgaaactgtagagctagaaaagacgttagaaatggtctagtccaaccactttgggtttcagaaaaggtaactgagaaaaggtaacttgttagtatgacaactaggacttgagcttatagcacatggcctcaccacttacatggtctactccccaaagcagctctgctcatttcattcttttaggtattggctggtgacttaatttgtaatttagattttaaacggtgagagtatgctgagatccattaaacaagtcacaactaaacttgagtaaaactatgacctttaattgtagacatagaattaagaaagaagatggggtgaccagcctgagcaacatggtgaaaccatgtctgtactacaaatacgaaaattagccgggcatggtggcacacgcctataatcccagctacttgggatgctgaggcaggagaatcattcgaatctgggaggcagaggttgcagtgatccaagatcgcgccactgcactccagcctgggtgacagagtgagtgagactctgtatcaaaaagaaaaaaaaaaaaaggaagaaagatgggattttatgaaagcactgtcatctctcaagagcaggtgcccactaaaataattaaatctaaatgtacaaattctttgcatatacatacacaacacacacacacgaatatgtatttttaatgaagagagctataaaaagtgcttaaacagttaacactgattttaaaactaattacttcaataaatataaaaacttcacacctcaactggtgttctacattttccatctggctttaaatctgaagcgaattaatttgcattataaaatttggaagctgtgtttcaacttagatattctttattttaaattatgagcttaagcgctgaaggacataaaaataaagccctaaaaaagcacagacagtagatggatttttactatgtctgctaatttattctcaacgctacaacagaaattagcatatgtcctcactctctctctgcaatccattcctaaggcctatttggctttgacttctctcatacgtgcactgagtaacaccaactgaccgatttctacatctgcagtcgatgtaacgtcctagtaagagaaacaacacatttttcgatgccttaagaaggttgccaaaatatagaagaggcctttggcatatttttgggaaaaaatatgcagtaatttggacccacaacagttgggtttcctcactggaaccaagtatcgagtacacagaacaaccaggctacgcaaatcttctctgtggatggctattataaatagacagatatgcctgtatatttagcaacccagtgcattccatactaaatgaaatactctgagtcttggaagaatcttctaatggttaaataccagttggtttcatttaattcaggaaatatttattgagtgcttcttatgtgtctagcgtggttaagagttagaaacatctatgggaacttctagaattgccactgaagtttcaaaggatgcatcatttatcatttctctgttttgagaaataattggacaaccagctaccttttcacttctaatgagactgaagaaaccagtccatgttaaaaggggcagtctttaggatctattataccaacactagaggagcgacgtaaagagcgtaattcttgacaagaacattaattcaccggcttcgttccccccacaccaagttagatgttaatgtgttgcatgaagagtttcaggtaggtacagcactatgtttttcatcttatgcaatagtcttttcagggagagtccaagaattgggaaagcagtgctgacataagatcattcacacacagaatcaaatgattctacaggatgctttgtttcaggaggttaaaaaaaaagaaaggatcttcattcagggcaaaataaggccttggcagcataaggacattcattagagttacctggaaataccgtggtagagaagtctagaaggaagcaaaaggtttatacagcattacggcttaacgtagttgcacatatacagtcatcagcttttacgatgacactgtgtgggagtagtcagctgtttccaatcagaaaagtgatgcagtaagtaaaacttcagtgctaaatcatatttactcttaaaggtgaccacatataaaaagtgtaacagttcaggccattactttgaaaattttaccctttttgtttgtttttaaacccaacgatttctgatgccagtagatggcactagtggtatattaacaagcataagtcattcttttgctcccgcttaaagggccgtactcttttatagaaacacttaagcagccaaagaaattgctctgtataactgtggtttttctgtaaaatgaaaaaaattagaataaactaaaacatctttaggaagagagtcccatggagctagtctgtgcatcctaagtccacagaacatagcattcctcctcctgactgcactgtcagtcactttaatccgactcttgctaatatactctgtcttatgactgccacactgcgctccttgccaggaagagcagcgcctaccagaacgtatcacattgagccactgtccccaatgtcataaaaatcagtgagacaaagtaaaacagaaattggagccagaggaaataaaactgtagaaacccactaaaaaatcaacagtaaagttaaggagttatgattgggtgacagaagaaacctcaaggaagaaaagtaaattgaggtgctgcttggaaagaaggaattacacagtagattaaagtcagaggaaggagtttgaaatacctgtgaatagctgcaaaaaggtcttctgtggtcctgggtcgactgggggtcattacctcatcattcccgtcttccttgaggaagtcacaggcctctgaggatgaaccggctgcgttggtctccggcaccccagctacagaagagcaggcaggcatacaagacgcacaagtgactggaatttcagtcctcagccaagcttctaaatatgctgcttccctgccattcccgacaatgtgagaaccacagggagatgccgtgggtctgtagtttgatagtttacaaagaagggaggaaatgacactagcctgagagccagagctcattctttgttaaagtatggaacgcccatggcatctctcttaaattttgttgcaacgtttctttgcgcggctcttcggaagggaggtgttacccattgctatttaatacccagcctgctgcagatcatctccatccccctattttctgccatgcctttaggtctagattttaaaaataataacaaaatgcaaagttggtaacttaatctgtgttttaacacaggaagcctacatactgctagctttaacaggaatctgatctacctgggttctttccacgtgtgagcattcaacaaccctatctggttcagctgcatatgggcagagggcacaggagagagaagccaggaagccagactcacctgctccgtcctgttgagataggcagctctccccatcgcccccagtatccgcactgttctcggctggctcctcctgcttgggggctggtgagacatcaggctgaaccatggggacattggcttccactctgctgggagacatggatcctgcagctcctccctcaagaaccgaggtgccagggtgcgtggcatgagagccagcttgggctgcagaactctcttttgcctccctgctgtgcacagagccctcctctcccgtcgtggggctgggcacagctcggagggcttcgctcacgttctctgcgggctccactgcaaaatctttctgcggaggtggtaccaccaggaacagtttgggcttcttggaaatggggggtggcttcctgctgggtgaagagtctgggagtggggtggtgctggggctgggccgagcctctgcctccccagcgcttggagctccagggctgcggctcacagggccaccacgctcagccgcactgccatggtcaccctgactcgagctcttggcaggcgtcggaagcgagcttgtcacagaggcaggctggctttcactctccatttcatttgtgctatttcgggatttcaggaaagcagatggctttaagtggtactgtggagcaactggagttcgttgttcctgagctgttcgttcagacaactgtgccgcctcagcgcctgagttctttctcacgggcctcaactgcaccatctgcaatgcttccgtggttatcaggggcatggggggcctgctggtctcctccttggtagaaggcggcctcaaggatccccgggaggattctggctggccagaatttgtgaaaggcggcctggtgtctttcatgaatttggggtcaagaggtggggcaggtgggggttccgaggaaggtaagagaggtgggggcaatggcaaggacacaggtgaatctggaagaatggggctcagtgcagggcggggaggagaaaggcaccaatcaggtggggagcagaaaggaatgagagcttctggcggcggaggggggaacacaggagagtgaggcagaggagagccctgggagcaatctgtgacaggaggtgggggaggaaggaaaggagacctgtctgcaggacaagggaatggaggagagggaacaggaggaggaggaggagccgggggagagcccacggctggatccagcttcttcatagtgccacttccttcagtagaagtactagaagaaagagaagtggacgatgaggaaatggatactgaagatatcagagaggacttcctttctggtaccttgggcttgggcttccccttcccgtttgctggtgacactgattttaaaaacacaggcacaggggtgagtgctgtgggtgtattcgactggctggaatacccactggatggagaaatgactctgtgtgacttctctggtgacatgatctttggtttgactgaaccaccgggcacttggggcattgtggctctggacccttcttggacatggcggactggcccgttcccagtgggcaccccactgctggttgaacagccccctgccgggttccccggatcttcctgcatgcccgtgtagtcaatgtaataaccccaggggtccgtgtactctgacttgacgctgcttgtgtcactctgcgatggcgtggccccgcacagggagtagacattgggggtggtggcggaagtcatgctgctgccagcactaactgtgctctggctccgggagcggggcagccagggctcttccaagtcactgcaggggctctgggagggcgagctgccactcttgcctgggaggctcagctgcagcgagtgctggagtgtggcgatcaggctctcgttgagcacctgcccgttgcactggctgctcttcttgggaatcctgcggagggagtctgtccgggagggtggcaggggaggcttctttgctttcttcaaagagatgtttcttgatagggatttatcctggtaattggaccggtccccttggtttttctgagctcttccaacaaaaacattgatcacgctgtgcctggggttcccaaagccatcactgctattgcacagattcccagatccatgtccagagtcagtgtgcacagatgcacagtagccatcgtggtcctcagaatacagcgacccagcatcctctttgttggacgtttggtccaaactgcagctgctcatgttacttgtgggagtggaatagccaggagttgctaaatgcggcttcaggggggatgcccttccattacctgaggatttgtattcccagggctccgagctgctgtgccctccgccccctgaataactagattcactcttgccatccacatcttgggggtgggctgggaaggccaggttgtttctacaattatacggcatagcttgggacccattctccctatttgctggagcatttagagggacggctgagtcacagagggacaacagtgcgggttcaccaggggaatgagggtctaagtcctgtgaaagaatggtggcatggccctcattccagtggcgaccgggagactgaggatcacctttcacagcatgcctggagatgaggtggtctctggattttatccttgcatgtgatgagccagaacttttactttcccgctgtcccgcactctgagcagtgggaatagcgatgacctcggaagaggaagacagtgtggcatttgggatgatgctggtggagtaggttgcatgaggagaaaccacacacgctgggctcattatattttcactctcgaagtgtctcaactcctgggatttgggtctcaaaagtgttccagtccctgaggcacctcctaaatggcctaagttttcatctgcttgtgggtgacctctctggtagaggaaagtgccattcatgtctcctgcagggccgagggcacccagcctcggctcaagggactgaatgtttgcccttgctccagaacgcggaagactatggaagccagcatcactgtcaaggcgggaagggaatacgatccctgcagaatcgctcagcacagacatgttgccagaggaacctgagaagtggcccatctgggcagcaatgccttgccccttctgtgccctgattctcctcatggaaggtggtacgaccttcacatcctccgtctgacagctggagtccctggtttctgagcgctgcccagcagaccgacagctattgaaccttcctagtgtagagtagtgatcaggggtgtacactgagtggccatcagcatcatcttggccagtgcctgatgctggagataaagcagaaagaggcttgttacctgaaaataaaatccatagttcatcacgtgtaccctcacccctctgacagaattttaaaaaaatttttctatttgatttaatttcctttctcctgtaggtatctaagtacatttaaaaagttactgatagctctaaaatgaaaattattgtcatgaatgtcaggtacttctcttaatttgtacctccaatcctcctatggcttgagtgctgcgtatggaattctcagggtatcccttcaagatcaaggctgccaagggctcagaggaggatttactttgaaataatcacctttcagtaaagtcttcaaggtagcctttcgcccactgggtgactgtgcagaccatctatcaagcagtgacacatctttcccaaaggtagatgaatgtagtaattgaacaatagggccacagagataccatatttgaggggtactggtataaaacagtgttaattacattaattctttatgtcagaaggaaattctaaggcaaagaaaattgatttacaggcccatctgtgttccaaacatttcattatccatctgaagccattatctgtctgttggtgacattcaaaattcaacagcaatctgttgtgttctagttggggaaactggcaggaactgatccagtgaacatttcctcaaattaggatgatttattcgttggagttttacaaccaaacagagaatagtatgttaaaaaaaaaaaaagacagaaagaaagaaacacaaggaagggccaacagagagggacgtggacgaggtaaactttaagtgtaaacagttagatttcaagctacccaggaaagaacagagcttatgagaaaaaagaaaaaaaatcacaaagacaagaacctacccaaagtgtactgagaaaaaaaaaagtcaatccttaagacaaatcgaatctctaaaaatagtagtaaaactatagttctccctatgttatctccatccaacaaggacccaaaagtatctatctcaacacgggctttgctgagcaatgcgagtcaagcacacccctctgtgtcagtggacacctggatgcgaccctaggactgatggggtttctaaggcttccctctcccaacacataatctaaccagggcatggactggatataggatgccttttgctcactcagatagcagagggtagtactgaaatggcagcactgtgcttgtatcaacctcaaaggagatggcaccctggaaggaaggatcccagcataaagccttctccttcactgtgatgatggagaggaatttttatacttgtatttttagcgaagatgatctatttcctctctctaccctctttcaagtactcactcactgaagacagatagacagacacatacacacacacgaggctgtcccacacagagagggaaatgggcaaaagggcaggacagaagaaaaacccactttgaggaagtgcaaaattttgccatttagtaatttagaagatgggaagttgactggtatcggtgtatcagtgtatacgagttcaattccaaacactcaaaatatctcattccattcaacaatgagttttgagtgtttggagttgaactcatataaacaaatacattttttttcctttcaaaattgtactagtttttgcatggagttagtggtagatttttaactgtctttaagtagcataaacaaaatcctgatacttttgggtagcagttttaaatgtgaaaccattctaggcatgtaaaaaaaaatagaaatacagctattttatcaccctctagagctaagtataactttcttattaaaacaaaaacatttcctaaagaccttaaaaagcatatgaaaaaactcatatatcttatcacaaggaccaccaaaattctattcccaaaacagaccctccaatattttcacagtataaaaagtttcagaatatgataggaaacagatgaatgctatagatgcatacgtcgttttactgtgcttagctttattgtgcattgcagataactggggtttttttttttgtttttttgtttttgtttttttttttacaagtcgaaggtttgtggcaaccctgtgttgagcaagtctattgatgccatttttctaacatgcttactgtgtgtctgtgtgtcacgttttggtaattcttgcaatatttcaaactttttcattattattagatctgttacggtgatctgtgaccagtgatctttgatattactattgtaattgttttgggggtgccacaaatcacacccacataagatagcaaatataattgatatatgttgtgtgtgttctgactgctccactgaccagctgtttcccagtttctctccctcttcttgggcttctctattccctgagatacaacaataatgaaattaggtcaattaataaccctacaatagcctctaagggttcaagcgaaaggaagagttgcatgtctctcactttaaatcaaaagttagaaatgattaagcttagtgaggaaggcatgtcaaaagctaagataggccaaaagctaggcctcttgtgccaaacagttaaccgagctgtgactgcaaaggaaaagttcttgaaggaaatgaaaagtgctactccagaacatacacaaataaaaaaacagctttattgctgatatggagaaagttttaatggtctggacagaaaatcaaaccagccacaacattccccttaagccaaagcctaatcaaggccctaactctcttcaattctgtgaaagctgagagaggtgaggaagctatagaagaagagctggaagctagcagaggttgtttcatgaggttgaaggaaaggagccatttatataacataaaagtgaagcagcaaatgctgacggaaaagctgcagaaatttatctagagaatctagctaggttaattgatgaaggtggctatactcgacaacaggttttcaatgtagatgaaacgaccttctagtggaagatgtcatctaggactttcaaagctacaagaggaggagtcaatgcctgtcttcaaagcttcaaaggacaaattgactcttgttacagccaaagtagctggtgactttaagttgaagccaatgctcttttaccattctgaaaatcctggagtccttaagaattatgctaaatagagtctgcctgtgctctgtaaatggaacaacaaagcctggatgacagcatgtcagcttacagcatgatttactgaatacttttaagtccacagttgagatctactgctcagaaaaaaaaagatttctttcatttacagtgcacctaggccagggggcagtggctcacacctgtaatcccaacactttgggaggccaaggcaggcagatcacctgaggtcaggagttcgagaccagcctgaacaacataaagaaaccctgtctctactaaaaatacaaaaaaattagccaggcgtggtggcacatgcctataatcccagctattcaggaggctgaggcaggagaatagcttgaacccaggaggcggaggttgcagtgagctgagatcgcgccattgcactccagcctgggcaacaagagtgaaactctgtctcaaaaaaaaaaaatacacaaatgtatatatatatatatatatatatacacacacacatatatatatatacacatatatatatacacatatatatatatacacatatatatatacacatatatatatatatacacacatatacacacacacacacacacacacacacacacacaaaaaaaaaaaaaaaaaatacaatgcacctagtcaccccagagctctgatgaagatgtacaaagttttcatgcctgttaacacaacattcattctgcagcccatggcttaaagagtaattttgactttcaagtcttaattttgtaatgcattttgtaaggccaaagctgccacagatagtgattcctctgatagatctgagcaaagtaagttggaaacctgaaaaggattcactactctagcacagtaagaacaattttaattcatgggagaaggtcaaaatatcaacattagtaagagtctggaagaaactgattccagctctcgtagataacttttgagaggatcaagactgaagtgaaggaagtgactccagatgtggtagaaacagcaaggaactagagttagaagtggagcctgaagatgtggctgaattgctgcaatttcatgatcaaacttgaacaacgaggcattgcttcttacagatgagcaatgaaaatgctttcttgagatggactctactagtgaagatgctgtgaacattgttaaaatgacaacaaaggattcagaatattatatgaacttagttgataaagcagcagcagggtttgagagattgactcaaatttttaaagtagttctactgtcggtaaaatgttaataaacagtattacgtgctacagagaaatctttcaagaaaggaaggatctgtcagtgtggcaaatgtcactgttgtcttattttaggaaactgccacagtcattcctaccttcagcaaccaccaccctgatcagtcagcagccatcaaatttgaggtaagacccttcaccagcaaaaagatgacaactgtctgtaggctcagatgatcctttgtattttttagcaatcaggtatttttacactgtacatttttttttaacataatgctattgcaaacttagtagaccacagcacagtgtaaacataacttttataggcactggaaaccaaaaaattcgtgtgacttgctgtattgcaatattcactttattgtagtggtctggaactatagctgcaataaccctgaggtatgtctttacagattaaaggatggaacaaactacaaaaagacaactacaaacaagtgtagaccacttaggtgctgctcaaacttgatgggatttatctgattttaagacataatgtacagaaataattatttatactttttcttttattaataatattttgaatttctaaaaaatatatgtaattaaggatgctgaatatttacaagttagtttatttaaggattaggctatgagtttttaaaaagtcttgtcaagtagatagtttcttagtataaactaccaaaaattattaataaagggattcctttagatgaggccttttctgcttagagaatatgtatggggataagttcagtagccaagtgttatatatatatatcaacaaaataatcctatctgattctaaaagatgaaacctcataagatgatgttcagatacatttctgtacagatttaagataaaagaaaaaattcaaaatgtccaattcactgaaacgaaaggcaacaaattttagtttatcagataagttttggaaataagcattaaatatcataccttgattttaaagtgttatatattggctagtctccagagtctattatttgtggattttgaaataaaaactgcatataattaaggataatataaatcctttctaattcatggaagtacctctctggttagatttttttaaaaatccaaagccgctggcaacttgggcaacatcttttggacagggtgcatctttcccagtgaatgcctttcctttgggacatcattttcttttttgtctaatttgtttgttatacttcccttgtgtgtcttatatctagaagaagactaattttaaagaaaatataaagtgtctatttttgatcatcattacctaggtatgatttgataatcattacctagatatactaccttggtagtttaagacttccaaaccagagtccttataagtgtaaaatactgggaaaaaaggcaagatcaaccagaagtcctgaaaggacagaacaaataaatatgtaatccaatatttttgctaaataaaactgtatacaaatgttaactcctcattctatccagtaatcctccaactagcctatctataaaaccacagtccttgtctaattatcttttttgttttaaaaaaactagctcttagatacggttgtctcagttgacctccagttctaatccaggtcatgtcatcgaccgtaatgatattgactgtctcgtgtctggcaacagtcacaacccagatgatgcggggaaagctattttcttccctccagcattagtgacgttccatgtcacatgtaaaagaaatgaacgtggattccagagattttaatcactgatttaaaaaatactaaaattacaaaagatatgatttatctagctggccagaacattctagtaagatcaaagaaacaactgagttattggcttccatactggttggttcagtaataaaagtgataaaaatttgtaactctcattctagacatcatattacatatgcatacagacaatgcatatggaatacttatgtgtatgtgcatctttacttgggccacactatccttctgatcttacaaagggcctaaatgcctgtctttaaagtcactccttgaagtcacatctcctaaaaagaccagttaaagtataaatgttgctggaatgctttaggaaattactccattaactatctactgaacatatgagtacagattagtttccgaattagttagctgtcacttcaagaatggaaaaaagagtctgaaagaataaggcataaactgagaggagagagagaaagcacacatgtttccttaaggtaggttgagggaaggtgcctggagacctcaggtagccacagaggaaccaggccactaatagcagcagcatgtggggcacgaaccaaagacagacttcacaatcccacgggagctgctgcagtcttgcctttgtttgtaataaaccaatccatgatagaacagggcaaacacctgtataccatctgggtcactgtggctgcctgcggcaaaggcagagcattgctattctcacctgactattgctacagcatggaaggcagagcatatatactacaaaagtggatggcagtaaaggagaaaatgccagctaaagaaaagtgagtctgtgctctctaatacaaggcattcaatcagggatgtttgggaaaacaaacagagaagcacaatgtctgtagcacccagaaggtgacatacaacctcaaggtgctatcacagatatatcactattgctggttacactcattttgactaaaagactaactgcaaactttagaaataatgactctgagtttctagagtgtaacttttgagagtaaataaaaacatcaggtgaaagtaactattaggaaataagtccataggttggccaaagaggaaaggacacatttcaagacaggtagtattaagtttcctataataatgaccacagtagctattacgtttatggtagtaccaggtactaaccaagtaccaagggcctcacatgcacaaattgtcctcaaacaaccctaagaggtaggttctattaacatcaccaagcccgtttgttaaatgaggaagtagactcagagagacgaagttaactgaggtcacccagagagcaagtggcagagttagggttcaaccaagcgggctggcactggagtccttagtcctaacccaggagctatgctatggtgcctctgcagaccttctggtattatgggccctattagaaaacagtgagaggaagttaatctagaaagaggaaaatgaagggattatccaaagcatttataatgataaccagaaacaaaatgggtaagtaattaaacaaccctcttcaccagccaaacacagattgaacaaaaagaattaaggataaagaagctatgaaattgtttcactgaaagtaataaaggcaccatccaacataaatgactattttctatcttattgacatttaccaataatcccagactgttgtttctgatgacaaaatgccaccagtagtgtcattatagttatagtgaaagtccatattcataatctgacgtcctagaatgacttctgtttcatgaaaacttaagatctaaatgacaagtaaatttaattgtgggaatagccaatgttccatgtcacataacaatgatgaggttaactatgaattctatcatcccagttaatcgttttcatgtaagctcttccttctccttgtaccttctccccaaaattcaatcaactctctctctccatgggatgttaagatttgcacctaatgcctcattcaggaaggaagctggcccgttggggcaccaaacggctatcagaatgtatcgattttataagcaccatgaatgaggttagcgcagtaaggccgagcagcagtgaagggcaacagaatacagttctgatgagccatacctagctccttctgtatgttgtcagggactcctgtaatagtctttctccttttgactttcttcggtcgtcttaccagagtgtctgtgtaaattagagaccgccgaaggctggcctggcgatcgaaattctcccctaatgtagagtagtagaacaagcaaagcaatgttattttcaagcaagctgacaccatgcactttcttccagaagcttgttgtaaaatgataagaaggtattaataatgttagccagtcatatgatgatgaatgctgaagggcaaaaaaggaagaaaagcacattatcacagtaaggctgttttccaagttccaccttccaaaggaagcaccttgatctcattttcaaatgagctggagtagcaaatgcaagtttaataacacactggaagagtcactctgtgttatttaacaaaacaaaattttggaagtgtttcaaatatatcctctggtcaccaaaaccactctacattagcgtgtaggtggtgatggtaatgagtatgtttcattcatctggtcatcttgcagagatcgaaattaatgtcttgccttgtgtgatgaaataagtaacttaataaagatttcttgaatgaaaagctttttcttcaatcaaggaggctgacaatttggatagactgtggtaattgttgtggtgtgacatacaactatagtgaaaaatgaaacgccttataatgataaagtacttttaccacaatgagacccagtagcgctgctgttgttaaagatgaattgcttctatttcacaattactttttaaagttgatcttaattcagacatttcaagtgattttgcaatcaaacctggaatgccacatcataggacttctttttttccttctagagtgtaggtgtgtttgattaacacatcatgagaaaccataaaataataaagtatataacaacatctgttattgattgatctgttttaaattacctgccagtttaaagtcttacagcactgacctttttgaatggttattctcctcaaaaagttattttcaaatatacatatatatatacacatatatatacatatatacacacacacatatatatatatacacacacacacattaaaaacttctatcattttatgcataaaagtataaaacattcacttttagcattattgacacatattcaatgtaggtatattgtggacaatgtaacttctattttggtaagaaaaaattgggaaccttatctaatcaaaacagagaataaaacatctgaatgatcaaaacacatttcccctactgaggaacaaacttaaataaatgcttgcaaacttacaaatgcttacaaccttgtcgctaatggagaaaaacagaaatgactgagagaagacccttgaataccagaaggtgccaatgctgtgaaaaactgggtcgctaagtgcaatggcataaatggcacatgtgaggggcaagtcacaactgcagtgcttcattagttccctgcagcagaagaaaaaacttccttgtatcaagacattaagaacagacaaaacattaatagaaagttacacttaggccagtgtggtggctcatacctataatcccagcacattggagagttgaggtgggtggatcacttgaactcaggcgttcaagaccagtctaagcaacatggtgaaatcctgtctctaccaaaaatacaaaaaaaggtatctgggtgtggtggcatgtgcctgtagtcccacctactcaggaggctgaggtggaaggatcgcttgagcctgggaggcggaggttgcagtgagccgagattgcgccactgcatgccagcatgggcgacagagtgagacctccatatcaaaaaataaaataaaataaaataaagttgcatttagtctccagttttgcttcctagacaaaagataaaatcacccaagctcccagaaaattaagaaacaaaccatttgaggatgaacacctaagacacacgtcattgaaggcaccaaatgcttgatcttgcatcatgacctaaaagtctcttctactggattatacattttttgagggtacagactgtgatgcatgtactttagcatcccctatggcactcagctaatgcctggcacaaagcagttattcaataaatatctgttgaattactcactgcctttaattgaaaaatggcattcatcagtcatggttactatttagaaataaacttgaaagtctgtgggcatactctggctctggaggctgcccaattcatgaattgttcattgctcaattaaactcttttaaattaaaaaaaaaaaaagaaataaacttggatagctcaaacaccagcacaaagccagtttgtaaaaattatttaagtatgtttatcctctacacttatcttccagatggaagagttgttgtcccacatagcagatgatagaagatatttatatgtacatattaagtattttttcctccagttttagaacatgccgagtgcccacaagactataactaaagggattaaatcaattttcaagccagcagctcatggtgctaacattctacctctatgcatggtgggctgcactctggatttgaaatcgccattttttttttttttttcctgctgagccttactaggaaaatcaaactagaggctcaatgctcaccccagcgaacgagcacatgacagttccctagaggaattttctttttttaatctcaaatatcttctaggactttagaaatacataatttaaagagcaggaagctgtataacctatgtcaattcaaccactaaaagtgaaaattttaaatttattgcttctttatgacagattagaaaaactaattctttaagaaatatgtgtgtatatgtgaacacacagatgtagaaaatggatcaataaatacgtgattaggtattatatttacttttggcatttctgcaaaatgttaatcactcgattaaaagtaaattacattttgacataactcatactgctctttctttattgtcattcacctttcctgagtagcattttaaaggcctctctttaaagtctaattcatctctacttagtcatcagataggatagaattaaagctcagagacatgacactgtcttctgttgtgacagtgtaattcattgcaaataattcttcattcctgaaactctaattactctattttaaatctcttaatctcaagataatgcatttcaccttaattccattaaggattgtcatatttcattgcacaatcttcttatcttataatattatttcataggcacttaattatatataatgtaattacatttctgctgcatttaatcaatcaaataatgtaattcattttcttatagaaaataagcagccttgtatttcattgaccagtacacattatactttgttctaaaacatagttatacttttaaaaataatctttaaaaaatatgatctcggtaaataagaaacatattcagaaagatcaataacactgtttgctgagaaaatggcttaaaatgccctgctattcttttaagatttaagtaaaataaatgtggaaaaatatatactgaattgaaaataattcatgcacttatttattaaatttctatggaatttaaaatatgagttctaaatgtaatttctaaatatctggtaaggttttaaaaaaaatcttcggtgactatgaaaatgctattagccccttacaagctcaccagtgccatggcaaaaagctttctaaagctttctaacagcagtagcctcagaagcacagcaaggatgctatgggtttccagagtaaatgttcaggaaaactcattctttttggtcacctagtttttttgttagcttctggccttaagggccctgctttgtatgacttgattatcaatgaccactattagtcatctgcttccatcaaacatacaattcaattaatagttgaagctattaactcttcacatgtctattttgcactttgtgccctccccaaaccactaacccatgctccttgtgggctatggaggtgataaggcaggaaaattttgattttttttttttttttttgaggtgaagttttgctcctttttgcccaggctggagtgcaatggtgcgatctctcggctcactgcaacctctgcctcccgggttgaagcaattctcctgcctcagactccagagtagctgggattacacgcacgtgccaccacgccctgctaattttgtatttttagtacagacagggtttcaccacgttggccaggctggtctcaaactcctgacctcaggtgatctgcccgcctcagcctcccaaagtgctgggattacaggtgtgagccaccacgcccagccaattttgctatctttttagcagctctcctaagttcatgaaagatcatctttgaattttatgtaccttgtcaccttaattgtcacaaatgattacaggctgagtataatattccataagaacttgaatttcaggtttggcaattaatatttgtagtctagcttaatataacatattctgaaaattttatattcagaagaaataagtaatgtctccttttttctactttaggaaatttctagaaaatctatcattagaaacatcacaaaataattatttacttctgtaaatattacttaaccctttagaagggaaatatatactttttcttcatacctaggaccacatttacaagatgtttccatataaccaaaggcttactaaaaagcaatttaattaaaagagacactcttaagatgaatggttggaccactgagttctttgacaccagtgtttggcgacatagtcttcgaacccaacaagcagtagacattttatatgcacacacatatgtagttttaatattcctctcattaaacaaagagcatgaagttggaccacagctattcacctttgatgtagcaatgaaatgctaacagcataaaacaaaaagctgtagtcattctcccaagtacattctgaacctgtctggctagcaaagcgtaccagttatgttaataggcaccacgtcagcctggactgtttgggcttgctgtcgcatcttctcttctggtgttggcagtggaagcgacttggtccagttcgtctgagtattaaggtcggagaagtcacttgaggctggtgttttaggtctcctgatggaaataaatctttcttcttctgatgaagacagagaacactgcagagaaaaaagaagcagcagccacagtgtataaagagctggcagaaacattttaaaatatatttcttatttttaaaaaaattggactggtttaaaagaagccaaaataattgatcgcttttaggaacagaagcaatggtttgctcagcctcttgagtctgacctataatatgcatgattcacaccagccttagtctgtaaactgtgaggactgcaaaaggttctgctgacccacaaaatctttgaagtcctttctgctttccctctatctactgtggtcagaaagctcatggaatggccggcgtggtggctcatgcctgtaatcccagcactttaggaggctgaggtgggtggatcacttgaggtcaggagttcaagaccagctggccaacatggtgaaaccccatctctactaaaaataaaaaatttagtcaggcgtggtggtgggcacctgtaatctcagctacttgggaggctgaggcaggaggattgcttgaacccgggaggcagaggttgcagtgagccaagattgtgccactgcactccagcctaggcaaaagagtgagactgtctaaaaaaaaaattttaaaaagaaagttcgtgggtttagtttaacattagaagcctagagaaaaacatcatggctgtggccatcagtttccatttttattaaaatttagttttgctcaaagtaatttctagcctcaatcttatttcctttaggctctgacttcaaaggacatttcaaaaatgatagagctattgttgttcaactatttgtgctcttccaaagccatttatatgggaaaaaatcagtgtgaaattgttaacttatacggcactgactaaagctctgctctgagccatatcagaattctacgaaaacatttctagcagtgtctgttttgatacagattaacatcctcactgaagagcccttcttcaatacctttctttcccataacaccttaaaaagtgtaagcaagaaagttgtgttggcgagcattttttgatggacttcagcctggctccacagcagctggttctgtgactaagatgctccaagaaggccaaatgagtgcagggtgcttaggaacacaacgaaaaagggtaatcgactttcgtgggggaaatgacagcttataatataaaataaatgtgtaataactgctctttaagtccgaagcatttaaacggaactaccaattatgaaaataaagcttttagaaagaatttcactggagaataaaaagtcagtgaaccttcccaaagggaatacctgtacaaccagcacccagttcaatacacccgctaccccaaccacatacccccaaacgagggtaagtgctatgtcaacttctaataccacagctttgttttgcctatatttgaactttctgtaaagggaatcgcactgtctgttctcttttgtgacctatttatttcacttaacgttatgtttgtgaggatttatctaactttacaaggcatgttttaacctttctggatttaaggcaagtctctaagaggacacagatgagaaatataaagaaatgcattgattagaaattttaggccaggcacgatggctcacgcctgtaatcccagcaccctgggaggccgaggtgggcggatcacctgaggacgggagcttgagaccagcctgagcaacacagagaaaacctgtctctcctaaaaatacaaaattagctgggcgtgctggcgcatgcctgtaatcccagctattggggaggctgaggcaggagaatcgcttgaacccaggaggcagaggttgcagtgagccgagatcgcaccattgcgccccagcctgggcaacaagagcaaaattctgtctcaaaaaaaaaaaaaaaaaaaaaaattcaaacacaagaatactgtcatcactgtttactgctactgcattcatcttgctgcaaaaatctgtatttattctacaactactagggctctataaatctgaaaaagattaggcaagagctaatgaaaatagtttgctgttggcgatagggccctagactaagaatccaaagacctgagtctgttcctaaactttgatgtttcctttgctgtaaaatggggctatacagcctacctttgtgcatccacagaggtgttcttaggacccaataagatgataaatgttaaagtgtctatgactgttaaatatcatggatatgggccaggcgtggtggctcatgcctgtaatcccagcattttgggaggctgaggcgggcagatcacaaagtcaggacatcgagaccatcctggccaaaatggtgaaatcccgtctctactaaaataaaaataaaattagctgggcgtggtggtgtgcacccatagtctcagctactcgggaggttaaggcaggagaatcgcttgaactcgggaggctgaggctgcggtgagctgaggttgcgccactgcactccagcctggcaacagatcgagactctgtctcaaaaaaaaaaaaaaatttgtggatatggaggtggtgctgatataaatatgactttagaaaagcaaagtcatgaattgacatgtactcacttttttttcttttacaaggagactaacaataataaaggcatgtggaaaagataaatcatataattagatatctcaatacatttacttgatgttcttaataaataaaacacataaaatgatcatccagtttcttttccacctaaggaaaatgtgaaataatgttttaattaaattgacaaatatactcaatttataaactgagcatgttgttggtgtcttgtaatactaaattgcactatatccattgatacttgatctgattctggttaaaagggttaaaactcacacagatccttaaagacaatcaaaggaatttttgggtcagcagcagctaagccatactgatgtaaatcaattatttccagctgttttgcagttgtgacacttaagtttgatttataatacatattctctacccttgagatgtgcacacacacacacacacacttaaaattaatgtcactgaagaatttcatggcagtttgtataagggccacatgtctgagtttgaatttcaagctagtaaattagaggattactccaatttcctgatacatacacataaatataatttttcaggcaaccttgaattacagtataaagcttgaaggcagtaagaagcaaatcctaaccagaaaggtttaaaagaaagaaaagtaaagctttcaggctacagctctctatgccctggagcaagggctcccttttccacatgacgtctgctgtgggagcaggatgaagcactgtctaccatttgtaagcatctcaatggtgctcatcagccccactaacctacttttcttctagttgactgacactgtcagaatcgataactctcataatgaaacagcacttccccgtagggacaatcaccacagatcactccagcatgacaactgacaaagagagtccattttgtaaagtgctcctttctcttacaagaaaatttcccagacaagcagggcacagataaagttatatgcaaatgtgactgttaggtctcacaatctactagatgacagtaaaacaccagcatggatgacttccacaatgatatgactttcatgcctcccagtgtgtataaacacagcaggggcacagaaaaacctccctcatttcagtggcagaacacatgattagcccattaagatggacatagtaataccggattattacactggcctcttaactacccccacttttctgcccttgttgaccatcctcccctgctcctcctcttccaatagtctactctcaatacagcaggcgaaggaatccttttagaaatgtaagtcagatcatgttgctcctctgttcaaaccctccaaagtccttactatgacctccaagaccctacatgatctaccagctggccactgttatctccctgactgcatttcctactgttctttcccatatttattctactccagccacaccatcctccatgctgtaccttgtaccttccatgcacactcgcgcctcagggcctttgcacttgctgttcccatggcctgaaatgctcctcccgtagacatccacacaggtagccccttctttttctttaggtccccttaagagtcctcttttgttgaggtcttaactgttcatcctattcaatttcaacctctttctaatattttgtatcccctttccctgctttttttctctttagtacatataactagtacacatatattttatttatatatattgtctctccgacaagaatataagttccatgaagctttgaatcagaattgcatagaaggttatttcagaatttgagcttcagaagggccacgatttagtaactgatagctatatgccttgcccttggtggggactttatagaacttatctcacttaatcttcacagtgtttgccttgtttaataataaggaagtggagactcaaaggagtaaagtaacttgacttttggaaagttcacaagtgggcagttgagattagaagccagaactgaccccaaagtctcccctgtgaaacagtgtaaaataacaatgtggcaatatttacaataaattactaggtcttctggtctcaaaacaaaatctccctttatgtctgtaaataagaatgaaaccttttgaaaagctatacaagtaaaaaaacagtgtgtaccagcatcctggcactgtcacttactaggtgtatgttttgatcaactcaatctccccatacagagaacagaatgacccaagtagcattcaaatgcttcatgttaatgaaatccctcaatatagggtgacttttttaaaaactgagtttaaaattgccttgctctcagaacttaaatgcagttttgggatctgtcagttggtcaataatgttcaccaataccccatatcctggtcctgggaggaatggagagtcacaaatgaaacataagccatgattccttgtgtcaaattgtttcatttagaaagggagagaaacaggcaacactgacagttactttgtaaattttggatgctggaagacctgcattttagagacttctaggttctacccggaaatcagacaagctctcaccagatggacagtgtggggcctgaaatagggtctctttcccatatattctcatacgaaatatgctctctttctcagaagagccaactgatccaaaagtgggattaactaagaaacacagattaattcagtcttttttgttttgatttgttagtaaaagttagaaaactgaattatagccagagctaaacttagtattcatttagaattattacatgaaaatagagaacagatgaaactatatagaacatatcaactatacagaactatatagttgatgtctttaagaagacagccacatacattccagtcctttttggaagacacttagtctttgatgctcttcctcccagaattaaacctcttgtgttgactcttggttttcaagatccttaatagtttcatagggtgccaaaacgtctgcagccttttggctatatgtttcttctgtctttagtagatttagacacaagagaccctcactgatttctgttctctgtgcattcttttttttttctcctggcgccaacaacaacagaaaaagtgggggtagtggaaatgaatccatgtagaagcacagttcatggttcatccagcaactccatgatggccaacaggtgacttccacatccatattattaagtaactttaattgttcattctttttttcttttgagacggagtctcactctgtcgcccaggctagagtgcagtgtagtggcgcaatcttggctcactgcatctccgcctcccaggttcaagcaattctcctgcctcagcctcccaagtagctgggattacaggcacgtgccaccatgcctggctaatttttgtatttttagtagagatggggtttcaccacattggccaggctggtctcaaactcttgacctcaggtaatccgcccgcctcagcctccaaagtgttgggattacaagcgtgagccaccatgcccagcctaattgttcattctttcatatgtattatattagtccctttacctcaaatctaattgctttatcaagagctttaaactttcttttgttgttgttgtttttgagatgaggtcttgccctcttgcccaggctagagtgcagcacagtgattacagctcatggcagcctcagattcctgggctcaagcaatcctcctgcctcagtttcccaagtagctgggagtatggatgtgcatcagcgtccctggctaatttatttatttttcatttatttttattgtattattatttttttgagacagggtctcactctgttacccaggctagagtgcagtggcagaatcacaactcactgcagactcaaactcctgggttcaagcgatcctcccacctcagcctcccgagtaactaggatgaccggcacaagccaccatgcccagctaatttttgaaaactttctgtagagacagggtcctgcacattgcccaggctggtcttgaactcctaggctcaagccatcctcctgcctcagctgccaaagtgctggaattacaggcttgagccactgcaccaggccctaagagctctaaactttcttatcacacagtgaattaaaatattttggatcttaactatcccatattaagcgatcctttcctcaaatgaaagaaaatacttaattagaacatatatgtttaaactgatacagtaagttgtttgtaatcatattttagaataacaaattatgtattaaaatcatataacataatgaatattcaagaactcactactcaacccatgacctaaaatattactaaaaacctgcatctccctccatgccccatcccatctccctacttccccagaggtgaccactagcctgaattttgtgttcctaattactccttgttatatgtgtgcgtgtgtgtgtgtgcgtgcgtgcataaacttgctttgacttttacaaaaatagtattattctctttgtgtttttcttactattatctttctaagacacatccatgtagttgtgtgaaactgtaattcattcatttcactggggtatacattccactccagtactaatttattcacattttttattgatggacaattgggttgtaaaagatgctctttgtattatctcaacaatgcaaaactccccataagagaatgagaatggttaggaggaaaggactgtggcaaaggctctactccccatacagtcattactgggggaaaaacatgagctctagagtcgtaagtctaggtttaaatcctggttttgcttttaggggtgatagatgtgttcactctcttgattatggtaatggtctcctgtgtgtatacatatgtcaaaatttattaagttgtatactttaaatatgtatagattattttatgtaagttatacttcaataaaaggcgttttaataaagaaagatcttgtttcagtatttaaaaactatgtgatcttaggcaagtgatctaatctctccaagatacagttttctcatccatgatatgggcataatcaaagctactttgcatggttgcaataaatactgaatatattcacatacagcactgagcacagtccctggcgcctgagcctttccatgtgccaagtgcttggcatcatactggaaacacagagatcaacaagatagggatgctgtccattaatctagaagagaaggcaggtataaacagaccctgattatagagtagtgggatggaaacagcaagagaaactggaatgggtcattggagacattctcactggtttgcaggcaaaaaggcgtgggaatgacagaccccaattttctcatttttgtctgcaatggcatggaataagaaggtgccataactgcagagcagtgagcattgactcatttgtgtttctacagtttcctgaaattactcacagagacccagtaacacatgattggacatggagtaatcacttctcgactgtaagctgccctaggccaagaatgggatccatatactgagaccaagtagcacttaaaaacttttttgggggaaaaaaaaattgagtgaagcataccagacaagtcaaagaggaataagagatgacaaaattgggcataatgaggaggaattgaggtaactgagtaatcttgcccttttgcttaaccagcatggtgcgatgaaaagaaatgagctgcaaggagccccgccttcacatgctccctgcaaggagccccgccttcacatgctccctgcaaggagccccgccttcacatgctccctgcaaggagccccgccttcgcatgcttcctggtgctttcgagctatgtgatcttgagaaagccatttcatatttctgagtctccatttccagattaaaataatagtaatagctattaaaataatctgtttcatggggctgtttgtggaaaataagatctaatttgtgaaaaagttctatatcctaacgtgtaccccgatgaacaagctagcaatagcataaacactggtagtgccacacctagataacctgtaaagccatgacaatcagaaattcgtcagtagctgctgaaacctctcaaatttattgccttgggcaggaaattctatgtgggtggaacaaaagacgagatgattgggagagtggccaaatttttataaaaacagacattgtctattgaatcattttctttgaagcgtggtttgaaataccaatcagcttaacaatacttatcatcatcatctgagcatctagtctgtgccaggcactgtgctaagggtttcacaaacattaatttacttcaacctcacaccaactctccaaggtaggttagggtaactatgtaattttatcgaaaccagaacacctctgagagtgaaagggggtgcaattaataattacacagaataacagctgtaaaccagggctgttctaagcaaaccggaacatgtggtttttatctctttacagttgaggaacctgaacctcacagacgaaagcaacttatccaaggccactgagctctgacaggtggaaaagctgccccaaacctacgctctcaagcatcatgttaaataagcctcctgtgtttacaggtatggcagcaaggttactgccttttcttcaaagtcttcctttgatttaaatatttcttatcaacaaagcctaaaacagaagctgacatgccagttcaaagaataacaggaaacagggaaatttcgatttctgtcacgactattaaagccaactgtttactgccaaaaatctagatctaatacatctctttaggggtgaattttacacaagagattgcataactcatgattgatatcctttctgctaagacaatggggattctgtgaaggtttcccagattcagtgaacgtatcatcaaatataacttccgataatggcaggtggaaaaattccctatcgactcacagtaagtattttcgcactgataactgacctgccttcaaatgcaagaacctctttggcagtacttggcatatgctgaaaactgaaaagagaaaaaagtcaaaaacagtacacaaagcaatggtgtactctttgatttcagagttgaatgaaaaggtattttctggaatttctttctttctttttttttttttggagatggagtctcacttactctgccgcccaggctggagtggagtggtgcgatctcagctcactgcaacctccacctcccagattcaagcaattctcctgcctcagcctgagtagctgggactacaggtgcatgccaccacgcctggctaatttttatattttcagtagagacagggtttcaccatgttggccaggctagtctggaactcctgacttcaagggatccgcctgcctcagcctcccaaagtgctgggattacaggcacacactaccatgcctggcttattttctggaatttctaaattgctttgccaacagtatttttttcaatgcatcatgtttatgtttagatgatatgcataacatatacaattggaaatattttcaacaattttcttcttgctacactatattcccactttgaacatcaaagatatgtgtggatctcgttagcaaaacatctttcttcataacataacacatagagtcctacttggtgtttcacattaggataatgaagataattattctagaacaattagccagagtaaataaccagaatcgacgtcctctaggttctcttttctaatttatatgtccttaacctttgccatattagcaactcatcttaagcacataatggatttttaatatttgttgaatgcaaattagatgatttttgtaagaaatacctcttttaaagtcaataatttgttaactcatgcatcccttcttccatatagtcactgctctttgtaacacacccctcccctcaacacctactaggaaatacaaaataaaaggttttccagatcgaatttcccttccaaattgactcctacacactctatatttaaaatgatcccctttgggaggccgaggtgggcggatcacgaggtcaggagcccaagaccagcctggtcaacatagtgaaaccccgtctctactaaaaatacaaaaattagctgggcatggtggcacgtgcctgtggtcccagctactcgggaggctgaggcaggagaatctcttgaacccaggaggtggaggttgtggtgagtcaagattgtgccactgtactccagactaggtaacagagtgaaactccaactgaaaaaaaaaaaaaaaaaaatcccaactgttagggtgatgttaagaacatgaaccacggttaggagtcttagtcttaacacggaagaccatactgctggcctggagcccctttcaacagttactggattcccacttgatttcaaatgatagcttgatgatctactaaatcccatgaagatttaggtctatttctagacttctattctgtttttaatattctgttatactggtttgcacattcagctgccacaatggaggaatccctaactctatgttctcataccgggtcaagtcagttcttccttactgctctcttgttttacagctttcctagctacacaaactttagattcagcttccttagtcgtctctctcctcctctcatcccccaaagtagcctcagatcaagacaaaacagaacagcctataatcccagcactttgggaggccaaggtaggtggatcacttgaggtccgggggttcgagaccagcctggccaaaatggtgaaaccccatctctactaaaagtacaaaaattaggctgggcgtggtggctcacacctgtaatcccagcactttgggaggccaaggagggcagatcacaaggtcaggagatcgagaccatcctggccacatggtgaaacccagtctctactacaaatacaaaaattagctgggtgtggtggcatgtgcctgtagtcccagctactcgggaggctgagccaggagaatcgcttgaacctgggaggtagaggttgcagtgagccaagttcacaccactgcactccagcctggcaacagagtacgtgaaaatctgtctcaaaaaaaaaaaaacaaaaaaaaaaacccagaaaaaatctactcacgtttttattggtattgtgttaatcttataaattaacttgggcagaatggtgagctttctgatattaacgcctctgaggatgtgatatgtcttttcagttattcaaatcttatttgtgttctatagtttgtttttgtttttgagaaaagagtcttgctctgtcacccaggctggagtgcagtggcacactctcggctcacagcaacctccacctcctgggttctccttcctcagcctgccgagtagctgggattacaggcacacaccaccatgcccagctgatttttgtatttttagtagagatggggtttcgccatgttggccaggctggtcttgaactcctgacctcaggtgatccacccaactttgcctcccaaagtgctggtattacaggcatgagtcccacgcctgaccatatagtattttttaaagtttctttcatatagatcttgtccttttcttattaaatgtatctgtactttgcaatagctattttaaatagatttttcctgttgtatcttctaatttgactttgtagatatgaaagttattgattgctgtatattacttgtataccttactatatcattgaactgttatttatagaagttttgaaatattactttcttggatttacccaagaaagacttaaccatgaacaaagagtgataatataatctcaatctttctcacttctgcactttttacactacagctttcctgattgtcttggctacctctttccatactatgctaagtggtaataatgatagtgaatgtccttctcttatatctcattctagtgggaacagcccattaaaaattgttggatttggaggacaaggcagataaattttgttaagttctgctatatttttttaaatcaagaatggccattaaattctaccaaataacttgtcaatatctacagttttgactatataaaatttttctcttcagatctattaatattattaatatataattagattacctagtatcaagcatccttgcattgctatcggaataaacccaggttgattttggaatatttcttttaatgagctgtcagattacgtttcctaatgtgttatttatgatctctaatgccaatattcatgagtgagactggccagttaattttctgctttgtacagtctttgccaggttttggcatcagtgttaaactaattcattaaaaagaaccgcactttttccctttgctctgaaaaagttttaagcattggacttacctactctttaaaatctttggtagaagaccgcccccacccaacatacacaagaccatctgggcttggcatttttttcaatttgatgtaaacgtttgataagatttctttttttttatggtaatcactctgataaaatatttcctcttttctagggtcagttttgatacaatgtataaactggaaaatcagtttcaaaattacctatgtatctcccatctatcaaaagatgatatacatcagccctctataacgtggggttctgtatctgtgcattaaaccaaccatggattaaaagtatttgaacaaaaaataaaagaatggctgtgtttgtaactgtatatatacagacattttttgtgtcattattccctaaacaatacagtataacaactctttacatagcatttacattatattagttattataagtaatctagaggtgatctagtatatgagaggatatgtgtaggttatatgcaaatactacatcatctgatataagggacttgagcatccatagatttgggtatttgtgggaaatcctggaaccagttgcccatggatactgagggattactgtatataatttttattcctaatcataaaattctctgcttaaaaaatgtgttagagatttcctgttagctatgcaataaaggaattccttcacttagcactgcccctctgtgagcgcacctcagcctccctccaccagcactcctgttatcactcctggtgaactcaatatccatagcacgacccatccaacacctacctgaatccttcacagcctcgcttctaacctgccttggctgcctactctatggacatactccctgacctacccattgcaggatgcctgaattgaggtttcaaaggtgtttcaaaaattggtaatcctacagaagttgccgaaggtgcgagaaaaagaaaagaattgagaccaggcccaatgtttttgacttaagtgactggtagaatggagttgtggtttactgaggtggttttgaaaaactatgaaagaaggaagttttttttttggaaatgtgagaatcacatatttggatttggacaagtttgagatacctgtaagacatttcagtggagatggacagtaagcagataactgcatgagtctgggctaaagatatacatttaggaaacatcaatgcatggtacttaaagccttgggactcagtgaaatcacccaaggagtcagactgctacagagtagcgggggtacaaggtttgagccccgagttaaaccaacttttacatatttggaagaaaaggactattcaacaaatgattgagaggcaatggctagagagggaagaggaaaaccaggagtgtgttgtgtcatgagagccaagtattcttagaagaaaagaatcataaacaatgtcaaatgctgagaggttgagtaagatgaggcctgagaattaactattaaatattagatttggcaacgtggaggtgactggtagacttaacaagagtagtttaagtgtgcgctggggataaaagtttgtttggaggggcttcaaaagagattgtgaagaaaggaagtggagatggcaagtctagacagttctttggacatgtttaattataaagttgaactgaacaatgtggtagaaatttgagggggatgaaaggtcaaagtagggtttcttcaagatgaaagaaaatatagcatgtttgtataatgatggttatgatgcaatcaagacagaaaattgattagggctaagagagagggatgaattgcaaatatgaagtccttgagaggttggccttattcatcccactggaaaaatactgagtgcctactgtgtgccaggccctgagctagccacttgggacacagcagggcattacaatggcgggaaagggtgagtccattaaggaggagatgtaagaagtttgatgggtttggtgatgaaaagatatgacccctgattgcttttgttttcctagtgcagcaaataccaagggaagagtctgagtctgttttctgttgctataaaagaatatctgagactaggtagtttataaagagtagaggtttatttagcttatggtttcacaggttgggaagttcaagggcatggccctggcttctggcaatggctcttatgctgtgtcaaaacatggtggagatgatcaaaagggaagcaggcatatgcaatgaggggaggatctgaggggctcctggctttataacaactgactctcactggaactaatctattcccacaagaaccaatcccatcaagagagagagggcagaaactcactaccaagccagagaacatcaccaagctattcatgagggatgttcctccacagcccagacacttcctactaggccccaacttccaacactaccacagtgggatcacatttcaatgtgagttttggtggggacaaactccatccatatccaaaccacagcaggcaggatctgcaagtgaagcagaagaagttgtgtttggagatttgagaaggtgtgaaatattacttgggagagtggaagaatgaactgatgagttaatatagtaggactgctaggcagcacttgaggcttgaggtcatacatttacagtgaaatataccttggcgttcttctctagcctcatttaactaaccaatcaggctttagtgcaaagcagggaaaaggtggatcaaactggagttgggttctttgccaggaaagtggcagaagaagaaaggagccagcagagttgaaaatgtgggcaaagaagtgagtgcaatggcaggccatgtaatataagccaaggaaggatgagtgtgtagatgaagagggcagggttaatgggtgagaatttctcagggggtgaaataatttttgtaatgagattctagagagaccaagctagaaaaatagcagatggagttatcctcaactcttctttgtctcataacttaagcgaatcctgcaggattcactttccaaataaacctagaaacaccaccactgccactctggtcccagccacccttggctatcacttgcctggattattgcaagggcctattgtcttgtctctgtgcttctgtcttccactctctatggtctaattttcctacagaccaatcccgttaaataatcaatcagatcatgttacttccctgctcaactcctccagtgactccccatctcacccaggagcaactaatccaaaatctttactatggctaattaggtcctatgtgatctggtccttggttatttcctccaaagtcattatcgccactcttccccttgctcagtgcccacttgctctggtgtgtggctattcttctcgcaggataactaaaataaggtttccaggccttcccatgtgcgatgttcttttttttttttttttttaaagttttattttttattttactttaagttctgggatacatgagctgaacgtgcaggtttgttacataggtatacatgtgccatggtggtttgctgcacctatcaacccgtcgtctaggttttaagccccacatgcattaggtatttgccctaatgctctccctcccctttgtccccaccccgctgacaggccccggtgtgtgatgttcccctccctgtgtccatgtgttctcactgctcaactcccacttgtgtgacgttcttatatgtcactcggtagtctgctctaatgatgactctcagagtccttcttggacactcaatctaaaatggcagtcctgttgctctagaactccccttaccattgttttatttaccttcataacacgtatcaccacctggtgttgtatgatgcttgtttgttcaccatgatctttccttcaacagaagtggctttggttcacttgatggcttctcaggacttagaacaatgcttggcatattggcaagactgaataaatatttactcagtaaatgaatgagggggtgagcaagatggtggccgcgcacgaggtcaggtgttcagctatcctcaccgctatctggtcctcgatctcactccgttgtttctgatgggaagcagtacagttatacctgggcaccaggggcagcctgacagaggctgagaggctgctggccgccagcttggccatcacggccggcaccgtcctcctctctgcccacttcctgctttggcagaccctggtgtcgtgggcggactgggccctcagcgccacactcctggagctccacggcctggaggccatcttgcaggtggtcgccatcgctgccttcgccaggcacttctgaagacaggtcagggcaggaaggccgaggatgggagcgctgcagaagacagcagccctaggccgctggagaacagctgcagtgcttaaattctgagcctcagtccactaacatctcagcagcatttgcacttagcgctaaacaaattctgtctctgtgattttttttttccatttctagatttactataagtgatccttaaaaagtatctaatctgttattttatagtagctttccttcacttgttttaattgtgtgttttcgctgtttggaataattacgttcaaatagctagatattttctcttcacttttttttttcttttctttttttttttttttgagacagagtctggctctgtcacccaggctggagtgcagtggcatgatctcggctcactgcaacctctgcctcgcaggttcaagtgattctcctgcctcagcctctctagtagctgagattacaggtgcgtgccaccacgcctcgctaatttttgtatttttagtagagacagggtttcaccatgttgtccaggttggtctcaaactcctggcctcaggtgatccacccacctcagcctcccaaagtgctgggattacaggcatgagccaccttgcctggctctcttcactgtatgttttacataaagcaatatgtatgccttcaaaaaaaaaaaaaaaaagaatgaataaactgcttgttcaaaaagctcacagagtacaataataccctaggccttcacattcactcaccacactcactgagtcacccagaacaacttcataccctaggccttcacattcattcaccacactcactgactcacccagaacaacttccagtcctgcaagctcacagggaacaatcttactccactccccactttctacataaggaaattaatgccttaaaggggtgtgatgcatccaaagaaacacagcaagtggcagaattaaacttgaaactgatctcctaactctgaatgccaccatctcctaactaactcccttcctcatcattcacacaactacacttttggtctcagtcctcagtgccgttttgcctgttgcaacagccccacaactattcttcttacatactttaccctctctggatccctcccccatttcctgactatccaagtcagaagaatttctttttcacctagtactgtatgccaaacacttataacagcaggttatatataatgctttttattctacttagttctccctaccctggagagctataaaatccttaaggcatgtagagatatcttattaatctttgcattttgcagcatctgatatatctcctacacttttttttcttttctttttttttttttttttgagacagagtctagctctgtcgcctaggctggagtgcaggggcatgatcttggctcactgcaacctctgcctcctgggttcaagcaattctcctgcctcagcctcccgagtagctgggattacaggtgcctgccaccatgcccagctaatttttgtatttttagtagagacggggttttaccatgttgtccaggctggtctcaaactcctgaccttaggtgatacacccacctcggacttccaaagtgctgggattacaggcgtgtgccactgcgcctggccccacatacactcctttttggggggggggcaggggggaacagagtcttgcttagttgcccaggctggagtgcagtggtgcgatctcagctcactgcaagctccgcctcccgggttcacgccatcctcctgcctcagtctcccgaatagctgggactacaggcacccgccaccatgcccagccaattttttttgtatttttagtacagacagggtttcaccatgttagccaggatgatctcaatctcctgaccttgtgatccacccgcctcagcctcccgaagtgctgggattacaggcgtgagccaccacgcctggccactggccccacatacactcttaagaaacatttattgcactggctgctttctgtttctaaaacattcttccagaaatgaatgatttttctgtttctaaaatgttcttccagaaatgctcattctttcaatcccaatcacctctatgctgagtaaggcctatccttttcatttaacattgcaaccgtccctccagtttattttactcgagcatatgccactttctaacagagcaaaattacttacagtcatgtgcagcataatgacatttcagtcaacaacaggccgcatatatgatggtggtcccataagatcataacggagctgagaaatttctattgcctagtgatgttgcagccatcataacacagcacaacgcattactcttgcttgtggtgatgctggtgtaaacaaacccactgccctgagagtcatataaaaatatgacacatataaaaatatgaggcccggctcagtggctcacacctgtaatctcagcactttgggaggctaaggcgggtggatcacctgagatcaggagtttgagaccagcctggacaacatggtgaaaccccgtctctactaaaaatctactaagtattgctggaacccaggaggcagtggttgcagtgagctgagatcgtgccactgcactccagcctgcgtgacaagagtgaaactccatctcaaaaccaacaaaaaaacaaaatatgacacaattatgcataatacatcatacttgataatgataacaagtgactatgctactggtttatgtatttaccatactatattttttgttattttattttattttatatatatatatttttttgagacggaatctcgctgtcgcccaggctggagtgcagtggcgcgatctcggctcactgccggctccgccccccgggttcacgccattctcctgcctcagcctcccgagtagctgggaccgcaggtgcccgccacctcgcctggctaattttttgtatttttagtagagacggggttttgccgtgttagccaggatggtctcgatctcctgacctcatgatccgcccgcctcggcctcccaaagtgctgggattacaggcgtaagccaccacgcccggccagtattttttgttattttagaaggtattcctacttatgaaaaaaacttaactgtaaaacagcctcaggccggtccttcagaaaatattccagaagtgggtattgttatcataggagataacagcttcatgggtgttattgccccgaggaacttccagtaggacaagatgtggaggggaagacagtgatattgatgctgctgaccctgtatcctgtgtaggccaaggctaatatgtgtgcttgtgtcttagtgtttaataaaaaagtttaaaaaggaaaacattttaaatagaaaaatggttacataataaggatataaagaaaatatctttgtacagctatacaatgtatttatgttttaagctgtgttattacaaaacagtcaaaaagtttaaaaaatttaaaagcttacaaagtaaaaaagttacaataagctaaggctaatttactattgaagaaagaaacatatttcttttttgtagagatgggttctcagtttgttgcccaggctagtcttgaattcctggactcatgcaatcctcccaccttggcctctcagagtgctgggattacaggtgtgagccactgaaactggctagaaaaatttttctttgtaaatgtggtgcagcctaagtgtgcagtatttataaagcctgcaatagtgtacaataatgccctaggccttcacattcactcaccacactcactgactcacccagagcaacttccagtcctgcaagctccattcatggtaagtgccctattgaggtgtaccatttttcatcatttctgctgcatttttattgtgcctttcctaggttcagatacacaaatgctcaccattatgttacaattatctagagtattcagtataataacatgctgtagcctaggagcaacaggctatataccgggggtccccagccccaaggccgtgcacttgtacccatctgtggcctgttaggaactgggctgaacagcaggaggtgagcggcagtcaagcaagcattactgcctgagctccgcctcctgtcagatcagcggcagcattagattctcataggagcgcaaaccctattgtgaactgtgcatgtgagggatctaggttgtgcgctccttatgagactctaactaatgtctgatgatctgacatggaacagtttcatcccaaaactgccccacccaccccagtctggtccatgaaaaaatagtcttccatgaaactggtccttggtgacaaaaaagctgggggccactgggctatcccatctagcctaggtgtgtagtaggctgtaccgtctaggtttgtgtaagtataccctatgatatttgtacaatgaccaatcacctaacaatgcatttctcagcatgtatccctgtcattacacaatgcatgactgtatttgctcttagtgcctccccgtgaaatcaaagctccatcaaagacagagatttcttgcatttgctttactgttacatctccaacacctagaatagtctctggcacatagaaggtgatcaataagtccttattttgcaaaggaattataattttgtgcttgaaggagctctttttcagaacacattacagaggggtgaggagtgtttctgggtcctaaatgaccaccactgctggctgtacagcttggatgcatccgtgcatcacagtgacctagtgaatggcaggaagggccatgaagattaataaagatttggactcagggcaaatatttacttagtagcaataactcaaagaattactgttgaataaataagccaactaagcagccaatcacgtactatgcggatgcacacaaatgaaaccctcacttcaacctgaagacattcgcacatgagttacgtagagggacctgcaggaagcggtagagaaaacataaggcttatgcgtttaatttccacaccaatttcaggatctttgtcactgacagcagcactaagacttgttaactttatatagttaagaagaacaaggctgagcgcgatgactcacgcctgtaagcctagaactttgggaggccaaagcaggcagactgcttgagcccaggagttccagaccagcctgggcaacatggcaacaccccatctctacaaaaaaatacaagaatcagctgggcgtggtgatgtgtacctgtaatctcagctactcgggaggctgaggcaggaggatcacttgaacccaggaggttgaggctacagtgaaccgtgactgcgccactgcactccagcctgggcaacagactcaacagagtgagatcctgtctcaaaaacaaaaaacaaaacaacaacaacaacaaaaacacaaaaaacagagtgctgcaattaatcgaatcatgaggaataagcaaaaggatggaaaacatgccctaaggtcatcgaattggctacgttatagtgggtggcaagtggcttttttgatgctccacagaatcaagaaatggttaatacaacactgaatgaggtagctcaaagagaagaatgttaaggaaagaagggagtgggggaggcaggaaggggaagaaggcagttagctattatgatagtataatttgttagctgatatttaattagtatataataatgtctaattaatatatatttgataaaataatttgatatttattttattctgaaaccaatttcttaacagagattgccttgagatgacattcagatctaatgatttaacatttttctaatatacttcaacttggttctacttatttaagaaaaggaaaaatacaagttccccataaatatctctaatgatatattccaaggatttcaaaatacttttacccgagaacaagattaacctgaatttttatttttattttttgagaaagggtctcacccagttgcccaggctggagtgcagtggtgcaaacacgtctcactgtagccttgacttcccgggcttaagcaatcctcccaccttagcctcccgagtaggtggcactacaggtgcgctaccacacccagctagtttttgttctattttctgtagagacaaggtcttgctacattgcccaggctggtcttgaattcctgagttcaagtgatctggccaccgtggcctcccaaagtgctgggattacaggtgtgagccaccacgcccaatcaaacctggatttttaaaaatcacaaaagtaacaaaaattttatagcagcaaagaaagttaagatttgaaagtggctggtgcttttgtaagagaccaaatataggaaagccatgagggcagacactgtaacttggagagggttgggagggaccccagaaaatagctctcctcccacaaacaccaggcaggtcctccccactgtctacctcctccctttcacaaaaagaaggacgctgtgggtcccaaggagacctgtcaagggtcccacagtcaacttctcattcctggtctagtgatgccagtgccagcaaatcacactaaggtaattattacggaaacatttgtgtttactgggatgtcatgacatatcacatcatataaaggatgacttttatatatattcccttatacacgaccattttcttcgcactcattttcagcaggataggagcctgttttctagggggtgatttgtcgaccctctcacacacatctgggagagggctgcttggccatcggggtccgtggcaatggtacagaggagtagaaactaatgcagaggctaacttccctcagagttgagtgtcatggtaagcaaagagctatgtgagaatttagaaattatttttccattctccagaaaaatcttaggatgctgtcatgacaatgccaatttgctagtggtctctacacacccagaaaccatctgtctcactgggccccactataaacttctcttccttctctgagcatcagtataaggctaaagtgtatctgaataaacagaagtcctactctgtaattcaccttctggttttcattttccactcatgccaacaagagaaaaataaaaattttcaaaattaaggttcagattaattttgaaatggctgctttactcattatagtaagataccgtctttgtatattttaaaggctcaaaggagtaatccaatatgtgaaaatacctttcaagaaataggaaaaacattctgtgataaaaatctgggtggggaggtaaggaataggaagttgttgaccaaaggggacaacatttcagacaggaggaataagtttttagatctattgcacagcaggatgactacaatctctaataataaattgtatatttcaaaataactaagagtgtaaatttcaaatgtcttgccgtaaaaaaaaaggtaagcacagtgacagatacgttagtctgatttaatcattccatattgtatcaaatcatcacactgtgctccataaatgtatataattatgacttatcaatttaaaatattaattacaaaatgtagaccaggcgcggtgactcatgcctgtaatcccagcactttgggaggctgaggtgggcagatcacttgaggtcaggaattcaagaccaccagcccagccaatatggtgaaaccccgtatctactgaaaatacaaaaatctgccaagcgtggtggcgtgtgcctgtaattccagctacttgggaggctgaggtacgagaattgcttgaacctgggagatggagtttgcagtgagccaagattgcatcactgcactccagcctgggcgacagagcaagcaagatctcaccaaaaaaaaaaaaaaaaagaatctaaaaaacaatctgggtgaagatcatttgaagatcaaaaatttaaggtagtaatttcccttttgctttttgaggcagggtcttgttttattgcccaggttggagtacaatggagtgaccacaactcaaattcctgggctcaagggatcctcctgtctcatccttccaagtagttgatacaacagatgcatgccacaatgcctggcttaatttcccattttttgatcaactattattttattctctgaagttacctatttgaggaaaaggacaataaattttgaataatgttctccaatcaataaggcatttataaattggcctaattccattgaaagtttttaattaattaaaaatggttgtgaaacaaaacactattcatcaaatcttattttaagtaattccagtgtcaatccacattacttagtaaatgaaaataaaactacataaatgaaaatcttcatatatttttactctttcatgtgtatttagtattgagaaaattacttatcttaagtggtttgtgcatatcaccagagatggcagaggaaaaggaacccaaatgtaaaatagcatcactaaatgaattggctagtgcaataatattaagtaaatgcacttcttctattctgtctctattaataacactgagcactgtaaacagtgggttctgctattatgatcagagttcttctttgtcatacaactgagtccttggtcatatgaaaactcaaacaaaagaaataagccctttatttttctaaccaaaaaagaatatttgagatgcacaaatacactgattttacgtctcctttatgaattccttagattataatcttaccttttaaaaaattaggatagttttatattttctgaaaagctgcaaagagtattgcaagtttcctgtgtaccctttacccagtttccatttatgttactcttacataattatggcgcatttgtcaaaaccaagaaattcacttgagacaatactattgattaaaatacaggctcaattttgattttaccagtttgtccacatatatcctttctctgttctgggacccaacccaggaccccgtgttgaactttgaagcttaccttttgatctgtttcttcatcttcatcttggtaatcatcacagaatgggctggcgttggccgcaaaggtgggtccctgagagtagtactgagaactgcggtagccatcatgccgcaacttatcgcattctgcagaggggcacgcagggaggggaaggaggccattaaaaagctgtactcctctttacttactttacgtttactcctcttttttactttttaaagttatatttttctaggcattaataggattttaaaataatgataaaaacagctaagaattattaaagtacctactacacactacataccatatatcaattaaatattaattaatattaatacttgataagattgtattcagagatcacaaccatcctgtgaggtagacaccatcattaattctactttactcacaggacattgaagtttagggtaattatattatttgctcaataatgttatgcaagtgagcagtggactcggaatattaatccagggccttagttaccagattatgtgatgatattattccacataaaaaaaaaaagtgatgctaatgctatgcttgtttcctagactcattagctggaagtgacacatgagatcatggattataatgctctcattttatattaattttctcaatttaattttgatgtcaaacagcctgtaaatgctgtgtggaatttaataggaaggcaggtgccagcctgagacatctgccagtccacagaggaatgcgtggcaccactatggtgccatggatctcggggtactggggccactggctgtgtggaaaggaggatccccttctaggggaaagcactgtgctggcggctctcatgggtgggggccggtgctgtaagaaaacttccaatggctctttaaagcaccaagatgcacaaaggggcatttgcctcaaaaaaggatttgccacagggttcctttaactatccagctttctaaaggagcacaaaacgtgtgtggttttggaaaagttttctctttgcatagctttataaaaaccatgcacctacaggcacagaactaaactagggcatcttcagagttcctttctgacatcaggatccatgattcttcctcaaagaggagacggcagtcacttcagtggagggctaaaaatattagaccaattttaaataagccaggggataaaaaaaaaagtcctgattctcctttgctacctcacagagggagtggaaggacaacgtttacaattcagaactgcaaatcagacaaaaatgaggatctgttagaatggcaaactaatgaaaaaatgcatatgttaatcataaaatagctaactaatactacttcagttacttataggtcaaaaatgttgtggtctgggctggcaactacttgtaatattgattaaaatggatatttaaagaaaatttctgaaaattccagaacacaacatatttttaatgagaatttactcatattaatctaactctttataagaaatattttcacattttctccatttgacaattttcctgaaataaagagtatgattagaaactatattctcaggctgggcgcggtggctcatgcctttaatcccagtactttgggaggccaaggcaggaggatcatctgaggtcgggaattcaagaccagcctgaccaacatagagaaaccctgtctctactaaaaatacaaaattagccaggtgtggtggcgcatgcctgtaatcccagctactcgggaaggttgaggcaggagaatcgcttgaacccgggaggcagaagttgcggtgagccgagatcgcaccactacactccagcctgggcaacaagagtgaaactcggtctcaaaaaaaaaaaaaaaagaagttttattctcactctacagagataatgttatataaaacatgattagtagttttcttctttttttttttgagacagggtcttactctgtcacgcaggctggagtgcagtagcatgatgatcacggctcacttcagcctcaatctcctaggctcaagtgatcctgccacctcagcttcctgagtagctggaactataggtacatgccatcacacctggcattattttattttttttattttttagatacagggactcactatgttacctaggctggtcttaaactcctggactcaagcgatccttccaccttggcctcccaaagtactgggattatagccgtgagccactgaacccggtctgattagtagttttcaaatggtattttctgcagagttcagggattctgtaaatactggattagattttctttaaatagccaccttaaagctaagattaaaaaataacactcaagaatggctacaattaaaaagcaaggccgggcatggtggctcacacctgtaatcccagcactttgggaggttgaggccggtggatcacttggcgctaggagtttgagaccagcctgggcaacatggcaaaaccccgtctctactaaaaatgcaaaacaaaaacaaaaacaaaaaaaagccaggcatggtgtcacacgcctgtaatcccagctactccataggctgaggcaggagaattgcttgaacctgggaggcagaggttgcagtgagctgagattacaccactgcactccagcctgggcaacagagtgagactctgtctcaaaaaacaaaacaaaacaaaagtcaaaagcaacagatgttggcatggatgtagacaaaaggaaacatttacacaccattggtgggaatgtatattagtacaacttctatggaaaacagtatggagatttctcaaagaactaaaaatagaatgaccattcaacccagcaatcccactactgagcatctatccaaaggaaaagacatcattatagaaaaaagatacctgcactcatatgtttatcacagcactattcacaacagcagagctatggaatcaacctaagtatccatcaacagttgactgaataaagaaaatgtggtagatacacaccatggaatactatgcagccataaaaaaagaattaaatcatataatttgcagcaacctggacagagttggaggccattatcctgagtgaaataactcagaaacagaaaatcaaatagtgcatgttctcaccttattagtgggaaccaaacaattggtacacatggacacacagatggaaataaatagacactggggactccaaagggagggaggatggaaggagggtgagggttaaaaattacctactgggggcccgcgccagtagctcacgcctgtaatccaagcactatgggaggccgaggcaggcggatcacctggggtcaggagttagagaccagcctggccaacacagaaaaacccccgtctctactaaaaatacaaaaattagccgggtatagtggtgggtacctgtaaccccagctacttggaaggctgaggcaggagaattgcttgaacttgggaggcagactgcagtgagcccaagatcatgctattgtactccagtctgggcaacaagagcgaaactccatctcagaaaaaagaaaaaaaattatctattgggtacaatgttcattgtttaggtgatgggtacactacaagcccaaagctcaccattacacaatatacccatgtaacaaacctgcacatatactccctgaatctaaaaaaaaaaaaaaaaaaaaaaaaagactcaagttcaatagttttacataccaaattttaagacaatgagggacttaatttattaacttatgctgctaaattaactttcctgtggtcctagaaataaagctattcctgctatctctgtaaaactaaagtctaaagatcagagtgaaacttgtaaaataaaccaatataaactattaccatttgcagctacttatctatgtaattcagggttttgaaatatttcacaaatatagagagaagtccaaagcccttttaaactaaattaatttgttgttcaaaattgttttatttgtttcattaaatgaaccctataagaagtttaaattatagggtagggcatagtgggtcacacctgtaatcccagtgctttgggaggccaaggtgggaggattgcttgaggccaggagttcaagaccagcctgaacaacataatgagaccgcatttctagaaaaaaattctttttaattagccgggcatggtggcatgtgcctgtagtcccagctactcaggaggctgaggcaggggcattgtttgagcccaggagtttgaagctgtggtgagctatgattgggctactgcactccagcctgggagacagagcaagaccatgcctctaaaatgtataataatagtaaaatgactaataataaataattatgttttaaaaatttaaattataaaacttaacactactcaaacattacttttacaaatatatgtaaggtattggataccaaggaagactgtgtttcaaaaggacgtttccctgggaaataagaagagactgctgggcaagatcatttctaaggatgattattagttttatattcttggcaataatattgaaaatagccaaaatgacttgacacgtgttagattttaaaagaccaaatattgcaaaatcatcatccacaagttaaaagcatgaaagaccagcaactattagtacttccagtgtgtgtcacctttttgagcccagtttagaagacaatgcatctttttttcaccatgaaatttatgtcactttttttttttttttttttttttttttttgagactgagtttcgctttttttgcccaggctggaacagagtgcaatggtgcaacctctgcctcccaggttcaagcgattctcctgcctcaaccttctgagtaggtgggaatacaggcatacaccaccatgcctggctaatttttggtcaggctggtctcaaagtcctgacctcaggtgatctgcctgccttggcctcccaaagtgctgggattacaagtgtgaaccaccgcgctggccataaaaatgttttaatagcagtataataaatggtagtagaacaaatgaaatatgatgctgatctaagataagactagacaatataaattcatggcagctgaccaatttttttttgctcttatcacatttctgaaatctagtaaactcataaaattccactgtcatttattccaactctagaggaaattcagaaaattctcctcttgtcaagttgcaacagagctcaggttctaaaaccatggttttgttcattagaattggagtttcttgtctgtggggtgaaacaaaagtgagagcaagccatcacgaataagcaaagactttttaaacactgaactgagagagtaactgcaaagcagagcataatttaaagccaggttatgcctgcgaccacaggctagaaacaagatcctaaatgtaaaagaagaccaatcgttcacacatattcttcttgcaacagaaatttacagcaaaactgtgttattgttctcacactactgcttggataaaggtatcactgttggttgtgtcctctagtttcccaaccttaaatttcctcctccttcctttcgtgtcaatccattttccatagcacaaggacgagggacaaacatttcttggtagaccaaagtttcaaatacagaagaaaaaaataatgtcatagcgctagatggtcatctgactctcacatgaatttattactgctgtggcctccaaatctctatgcattaagctattctttagtcattcaatttttaatatagtagtccctgacttatactcagggtatatgttccaagacccctggtggatgcctgaaaccacagacagtaccaaatcctatctattgctatgtttttttcctagacatctatacctatgataatgtttgaggtgtgacaggaaaactagcaggagcttctttttcctttttcacaatttctcagatggaagattcatttttaccatggatcttagcaacgtcagcatatgattttcttttgctgtcctttttaagtcaaaagctttcaccttttcacttaaaggagacacttgacagcttctttggcatatccaaatggccagcattactcctcttgtcctttggggccattattaagtaaaataagggtgacttgaatacaagcactgagatgctgacaggcaatctgataaccaagctggctacaaactgactgatggacgggcagtgtctgcagcgtggatccgatggacaaagggaggtttcatgtcttaggcaggatggagggggctgttgtgagatttcatcacactgctcagaatggcaaaaactttaaacttataaattgttcacttctggaattttccatttaaaattttcagaccatggttgactgcaggtagctgaaactatggaaagtgaaaccacaaataagagaggactactttaaacatgctattatctacatgaggaaaatgcaaggtgctttgtgatgctgataaaagtacgtggacatttttatcactgacttctgtaatttgtcatgatggatttcttcatatgcataattccacaaaaggaagcatacgatgcagtgaaaattttcccaagtttattataaagattctgaaatataatctgaaggggtaaagtccttaaatagatggttactaagtatgacctgcttaaatgagagggagatggagaaatagaagaaacagaaattgaatgcgaagtggaataagatgggattgtttttctatttcccaagaaaatgatatgggaagatgaggggatgctaaaagaaaaaaagtaagaagtttgttgacttcttagattgcgtgagaaaggcaaagaactgacggaagcagcagtcattcctctgtatcagaaggggattggttccagaaccccagaatatcaaaatccatgcatactaaactcctgcaaatcgtagacccagaaagtcggttttctgtataatgcaggtttcacaccctgtgaatattgtattttccattctcatttggtttcagatgcagaaaatacctgagtattgtattttccattcgcatttggtttcggttgcaggacccagaatgtatggagggctgactgtattgaaaaaatccatataagtggaccctccaagttcaaatgtgttgtgttcaagggtcaactgtatttcaaacaagcactgcagtgtgaaaagccagaaggaccagttcggtaggccagttgtcatttttccggtcatgggtagtgttgacgtgtatgagtatgagctcctaggaaagttttgaaacattcaggtcaaagcataatttgttatttctagcatggtattctacatatatcatattttaaaaactgaatgtggtttatttttaatagcattgaatcttttgcaaccttcctactgtaattcaaggtcattaagcattgggaggactccagtcccaaagttaattataaaaatagcagtcatgatgtactgcttcagtgagaaagtcctatgatgatctagagtctaaaaaatcttttttcggatgactgatttttaaagctaatactactgacactttttaaaactgaaagcctcttgttatcattacctgatttgtgtttacaataattctctgagaattgaaggaaagcagttattgtatcagtcttacagattctgaagcccaggtataaagtttctggtagatcgaagtttttaaacttctatctcagttaataatctaccagattattaataacagggtaaaaggccagttctatcacaaaacttcatcttagtccagaaggactgagaatacataagactataaacattcatgtttagaagaaaatgaattccagcccaatagctgaatgaagtattgtatagctaaataatctagtttgagctttcaaataaatacacaggaaaaactgactgcacctaaatatcatgtattgtgaatattagagaacttattttcttaatgaaaaaccaaaccaaagtgcatttaaaatagaagggatttatttacctaccccttcataaatttgttgggcttggcaatactggaaaagagaaagaaatcatactgatatagttaggattctcccttgtcactcatgcacgatgaattttccaaaaatatgtttagattttccataaattcttcaaagcagttgaacttcaatttatttaaattgtcttcaacaataaacaaactagaacataattaaaagacaatagatgttcaaacatttaagtcactcagttgtgtgtagcatatcaaagaggtgaaaagctgttttaaatctcaaagacactgtgtatttaatacagatcttttcaatgaatattttcctttataatttatagtagttttaaataagtttcaaataaataggcccttttggtttattattagactaatgatttattcttttctcccttcccctctttttagagcaagagctgttttatgtagctatacaggaatatgtataacagcataaaagcatgcttttatatttcaagtattaaactcaaatttgcctcctaataaatgcaaatttgagcccataagaccacttcttcaccaattatcacttcagtgacacttagcattcaaagtaacataaaacataaaaaagagaaaatacatgtctttaacgagtaagcccaagactttctaaaagttctaaaagtaaatattttatctcttaatggaatctataaagacaaaacattccaggtaatagagtacaatgtgcttagctgcaggtgaagcaagaaagagagggccaatatgaaagtatgccaactatcaccctggtgtcagggaaaagggaaatttcctgaagggactaagtcttactttgccttaaaaaaagaagatgaagccgggcgtggtggctcacgcctgtaatcccaacatttgggaggccaaggcgggcggatcacaaggtcaggagttcaagaccagcctgttcaacatggtgacactccatctctattaaaaatacaaaaattagctgggcgtggtggcgggtgcctgtagtcccagctactcaggaggctgaggcaggagaattgcttgaacccgggaggcggaggttgcagtgagctgagatggcaccactgcactccagcctgggtgacagagcgagactccgtctcaaaaaaaaaaaaaaaaaaaaaggaggatgaaagttatctagacttataccaccagaaagttggaaaagagaaagtcaagctggtgacaattatgttttctttccaacctccaggttcagtgattctcctgacctgtgctttggccagccatttttttctaaacctctgaatactcttcttccagacagtcaaggcagagctagcttggagaaaacacagaatgaatacacagaggcatcaacaccagtttctcaagtcacctttgccaccaacgagagagaagagcagcagcagtcaagagcaccaactctgaaactgggtagctgtgtcttggaatcctaacttgtagcttgtaaagggtagtgggactaaagggttacattcccgccttcaaggtgcttacagtttagctgcctgattaaacaaattcacaggccaatgtacagagcagtggcatcccaaattaaggtacatcagaatcccctggagggcttgttataaaaatactgctgagtccactcccatatctgattcagtaggtctgggatggagcctgacaacttggattcctagcaagtcctcaatcaatgctgatgcagctgtcctgtgagccacaccgtgagaaaactgtttcagagtaaggcaaatacctaaagagaagtagaaataaaattaaagggatcaacatgatatccatttagggtggaggtaaaagtgaaagaggagaagtcttctctactcagaggaggtgttcggtggggatcccaaagagggcaatagaattttgcttcctacatattccacatgacaaatgataaaatgcccaaaggaaaagagggttggtctgttctttttattatgtcacaaatgatccacactcgccaagcgaataacttaaaagggaacataggataaagaatttagctgatatggtacagatcaatggtgggggaatgctatatctggtatctacttttagtccctaaagaatgccattttgtttcaggaaaagctttagctttgctactgtagaaatgtgtcttacatgtcaagatttccttaaaatgcttggagggttcttacatttattttaacattccactccagctgcaactgcagggaaaacttcctgatcaggcctccaccatctctcacctgatggtgacctccacctggtctcctacattgacacccctgtctcctttactgtgaactttcaacacacaatcagatggatccatttcaaactaatgagtcagattatgtcacttctaagttcaaatctctccacgccctgaatgtaaaagccaaaatcctcctaatggtttctaagccctacatgatatggctcaatgtgggtggctggctggtgctcggtgagttccttaaatgaatgaatgatctgtatttgttggacagtagcgtgcttgaaggggtactgtaactatatgacaaaggtgatggccccattggtcacccaggtagattttatcctcagccacattttccaccttcattaacccaaggcatatgacctgacctcccattaaatgggcctcttctcccatccacaactcacatatttgagtaataagaggatgagaggagagtaggtggaacagaatgaataaggaagatgatgtctggtgcaccatcatggttatctatccaaggaaattttgtctcagtagaatttcagggaaactgaccaatctaggattaaaaagctaactgcatcatgggcaactccccaaagctttctagtcagacagaacagatgccacaggaaagctgcattttcagaaaaagcttgcaggcaagtgtaggcggggagtaagatgtaagagaggaggtggtgacagaatgctacctttgaaatggacaggtttctttgccaggggagggggtaaaaaaaaggaatgataagcagactgcctaaaaattattttataataacacaattccaaatgacttctcatttacaatgtaaatatacaatttacattgtatatttagcaaaataaaatgaccaggttgggaagaaccacagagggaaaatacactactaattgtggtcatcggctcaacagtcaaactggaaatgaatttgttaacaatgcattaacacattttagaaagactggttttcccccatgtcttgggaccaatatctctgtcactgacattaaacaccatagacaatctcattttatgtagaagggttaaaaataaacggccattttgattaatattcttgctctgtgattaattcctattagagtgaaattaaaacctcccaaaacaaaacaaaacagacaaacaacaacaaaaaaccttaaggagttaaacattaaaagttgagccactggataaactgtctgttagctttgtttttcattgcacaccatggcaagaattattattaaaatgtcatttgccattgcagaaaaccagcttttaacatttcttcttgtcacatgcccagattaatttaagaagccttgaagaactaaatctgatttaaattaaggtgagagctttctgatgccatgattaatgtgagtgtgctgagagtctgcaagtcctagttgagcaccaccagagagagcagccaaattggaggcgatctcatttcactttagaattaaaaagccgtatcattggcagcagaggagcatcaccaaggttactcaagatcaaatcgcctgcaaagattctaagccaacacgggagacttcggttgtatcgtgaatgataacaaaccttaccaacagtaccttcaatgtatcgtttttatgctgccctgagtgaaatatagaggccactcaagttacttactttatcgggagttaaaatagaattgctgaaacagcagactggctacagacacaaaaacaaaacaaaaagccttttgtttaaacaatccgcagtgctttgttaagacctggatcatttaaatgactgtctttgccattctatcttttctgtgttgcttaccgttaaaaaaaaaaaaaaaaaaaaaggtatgggggtgggggcaacacgtctctttaactatctgaaaaagcaatgattgttcatttttcctttgctcttgcatccaacttccctctcccgagttaaggacaccaaggaaagcacttcttttggagttactgtacccagagtagtacttagtattatagaaaattccgtgccatcaaattcaataggagaagttaaatagcccctttttgtatataattcccattctgttaatcccatatttttgtctgctcttttctttttctcaatagggcatttaatccgtggtttcacccggctgggcaactttccctcaggacaaaaattccaatagagccaaatgaaataccacacatattttttttaagcctttaataatatcatttgtctttgaaaagtcaacctaattaaattcacaagacctgagcgagagagcaccaaataaagtcatccttttcaccaaagaactaacaatatggcgggggccacattgcaagcaaggctcccacaccatgtaatgaacagcctcgatctctggctccgtctcataacacgcttccccaattccctctaggagacagaggccgcaacctccgaccctccgctttgccctgagttgactgcctccttcctgcttcttcagagaacatcctcccattctctttccatatctgtaatcctttcccctcctgctgactccttttgtctacggccctgttttcataagctctagtttttaaaacatgtaataatatcagctgtaccgtgccaccacctcaaaatactatcccttccctctctgttctgttggcatcattcactcacctttatttctttaaaacaattacttttattgtttttctgcttataaaaatccttcttatctcaggaaatctggcttcttaatctaaagacttccttgaaactgccctttcaaaggtcaccaatcaccacctaacaaccgattcaatagccttttcttacaatgactctctccccacctgtgagcgccatgatgactgcctcatcctggctaaactttcttcttccccagttgtgctcttttgcagacttctccctcccagtgccctaaagtaaagcttccaagcctcaaccgcccccctcctcaccactggccctctccatccccaatctcatcactccacattctcactacttgttccccggctttgactctgatctctctcctgtgttttaggtgacttttccaaacattttcaggccttctacaaacacaacagtatttgcagtcccagtcactggactgtgtgctggggacacacaagtgaaaagacaaagccctgttcccatggatgttactgtcaagtagggagataaacatgcaaacacaattatatagtgtatcataagcagcagaatggtggagtgtaagcttccatgacaaggtagaaaaggacttcctggggctacccaggggaaatccaggaaaggttgtgggggactctagcacccaaggatgactcacaaaggggaaacaggagttggccaggtgtgagaggttgtggttcagaagggaaaaagtatggcttgggacatgcagtagacagaaagaagaacaagacaagctagcattccaactgaaggactttatcattacacgtgaaggcacaaagtaaaaaaaattgggtggaggagtagagatgtctggggagcaaaggtgattctgcagatgagatgagacaaacaggcttgagttcaggaaggtttctagatgctaagagcttaggttatattctgttagtaatggggagctggtaaagaatttttaactagggcaggctgaccaagttcgttttaaagataacacccagtgttgaggcttaataataccaccgctatgaaccttgcacataagctagtcatacatacatcttatctctggctagctttcagcctctggaggaaagcattgacgacattcatctttgattgcactataatatccagcccagtgcttcacttgcagtatgcacttagacaatttttccgtccatacaaacttaagattacacatcccagtttgtcaggacttaggctcagccatcggtaatatctttgtgtcagttaacttcacacatattacccttaaacagttaagtactgagaagccaatcagaattttagagcttagaagggaacatagaaatcataaattgtttttcagaggtggaagccaagtacgaagatgggacctgacttccaatatcctgcagcttaccactgacaacactgcaaccagaattctggtctcccatctcatcttctggaatcactaatgacaacaaaacaagatgtcagtgctactgcggttttgcgaaatatgagacaattatacttccttcctctgttcagttgctttttcagaataacatagcactcctcctgccccccaattctatgccaatatttgtttcaactagaaaacgatttaaaattgtataaatgaatataagtaatcgaaagtttcttgcttgaatcttaagtggctgggcgtggtggctcacgtctataatcccagcactttgggaggctgaggtaggcagatcacctgaggtcaggagttagtgaccagcctggccaacatggcaaaatcccgtctgtcctaaaaatacaaaaattagctgggcatggtggtgcacacctgtagtcccagctacttgggatgctgcggcatgagaatcacttgaacctaggaggcggaggttgcagtgagccgagatcacaccactgcactccagcctgggcaccagagcaagactctgtctcaaaaaaaaaaaaatcagaataccttagccagagacatctgaccttcaccttttgcatatcaattttactgaagtattctttgggaagtaacaaactaggcaaattgtaaactcagctgcaagtgctaaatcattagtgtatttattaatttcaaatgtttatctttccttcccttgcaacctgtgcctattttttaagtctattgagttactaataaccaattataaccctaaaaataagcaccaaaagccattaagatgaaagaatggttatagatattaatcaaacatgtcatgtgatgcttcctttatttctcttagacttatttgaattttaatgaaatcaggggtgagtgaggagacttcaggagtaaccatgaagtcaccacctttaggcaacgatgagccaatttgcatttctaaattaactggctaaagaaaccaaatccatctttggccatgagattcccagggtgagctttgtccctgtgaacttccataaagtggagggcagctgaaagggcatcaaagggacaggtctcttcagtgcttgtgaggtctgagatcagaataggccagcatgcgtgagcaccaggaacccttaacttctctgggtcttgctttgcttatctacaaaatggaaagggggactgaccagaggactgggcagctcctttcagctccagcattctaggggtctttcagaggttgatggtgagtggcgaaaggcatcttgctcatgtggatgaaatgaacctgagtattaagcgtctgtcactgtcatcagaaggtgttccttgttctgttcctttatccctcctccccacagtatatctctggagcacaacaggtaggaaagaaagacccaactaaatcctgaggccatttgagatttgtaaaattatatctgtgttccattgcacttcaattaaaatgcacccctccctccacagacacttataacttccacattgaggggcaggtacattgagatattaatactttacatgaatatgttcatttcattcccatgtaaacagatattatggcctttatagatgagaaaataagatcaaaatgttgaagaaacaaacaaaattaaactcaagtaacctatacctagtatgtaacaaagtcaggattggaatttagatgtgactcaaagtacttcacatgacacctggacttctgttagaaaacaggaagatggctgggtgtggaggctcacgcctgtaatgccagcactttgggaggccgaggcaggtggacaacttgagcccaggagtaagaccagacagggcaacaaggcaagaccctatctctacaaatacaaaagctagctgggcacggtgttgtgtgcctgtagtcccagctactcagggtgctgaggtgggaggatggattgggcccgggaagtcaaggctgcagtgagccgtgatcacattgctgcactctagcctgggcaacagagcaagaccctgtctcaaaaaaaaaaaaaaaaagagagaaagaaagaaagaaagaagagagagggagagagggagagagggagagagagagagagagagggagagagggagagagagagagagagagggagagagggagagagggagagagggagagagcgagagggggagagggggagggggagacagggggagagagggagagaaggagagagggagagggggagagggggagagggggagagagagagagagagagacaaagaaaaaagaaaggcaagcaagcaggaacaggaagcttctgaagtttaggtcacattttgacctaggtaatggttatacaggtgttcactctatttctcaagccatacatgttttatgtacctctctgtgttatatgtcatatttttttttaaagttacagaaaaaaagatgaagaattcaacgtggttagcacaaggtgggcaaagcagatgtccatcttgggcctgtctgaggtggtgggcagatgcatcatgccatcagggagagctctcaatcaatgtccacaggccattcctacaaaggcacctcctacacagttctgggaaagtgccacaggaccttcaagtggagaaccgatggcgaaagacaaggggtatctgcgatatctcagggacccacgtgctctaggcagataaataagacagacaagcaccctcatcaaattcagaaggaggcccacaatctctcccaagacaaacatacttgtctacaccaaaagggagctaggaggcttcatgacaactaagggtggatgcagtcaccctcaaagtctgctgtcggtaactgtagagaaatctggctggaacaacttggaaatctagtccataattttaggaaaggtaaatcattctccttttttttttgagacagtctcactctgtcaccaggctggagtgcagtggcacaatctcagcccactgcagcctctgcctcccaggttcaagtgattctcctgcctcagcctcctgagaaggctgggactacaggcatgcgccaccacacccggctaatttttgtatttttagtagagacggggtttcaccatgttggccaggatggtatctatctcctgacctcgtgatccgcccgccttggcctcccaaagtactgggattataggcgtgagccaccgcgcctggatggtaaatcattctttaatgttaaacaggtcgatgtgtgcaccattgtttttaatcacttgctgtaagtagttattttttcacattgtgtaataaattctcaactcctatcctttcaggtataataaatataaccctctgactttgaatgacataggccagattcaacactcctccttgcgctcacactttttaaattctagagccatggagcatgctgacctgctaaaatgcatttcttcaggaaagagctgtgactagagaacatttctgatgccaacaacagctgctctgtgaactaattcaggcaggaatgtacacagagacagtaactaaagtgcctgttaaacatactgtgagaaattatgtttatctctctctcaagttgggctttttggggatggagccttaaaagtgacatgtctttatttcagcctttaatatgctcatagttgtcaaatgaagtctacaggttacaaaaaagcaaaatctgaacctctcattcagcttactcctatctcttgatttcttttccacttagttgtagcccgttccataaagccaaaaactatgcagataaaaatttagccagatttaggttacttatcatcacagctatctccaatgaagttcatgaaggattcaaacaatgatggatgtaaaaagggtagacttcttctggaaactcagtaagaagctgagtgaattcttcacagataatgggatccatcttcaaaaatttattttttgttgctagccagatgtctattgaagcaaatattaaaatgccatttttaaatctgggtaaatgttgagtatctcttatccgaaatgcttgagaccagaaatgtttccgatttgggtttttttctgattttggaatatttgcattataactactgagtgagaatccctaatcccaaaacccaaaatgctcaaatgagtacttcctttgagcatcatgtcagtgctcaaaaagttttggattttggagcatttcagatttctaattttcagattagggatgttcaacctgtacatgtttgtatcttcattagcagtgaatcattacctaaatctccagtaacaaatcaacaaacaaaatcaagacatttaatctaagcctgtgaccatcaaattttatcaaagtctccagagactctccagctgtaaatacaaaagatatctgctatattcggatcagagtagagcgaaattatacatggacaagagcctgctccaaatgccattttacacatcttgaaagactatctcctctctcatgtggggatgggagcaggagggagtgggggagtgaggggacctcccagtgcttttctttgttctctgactgagccctctctccctgtgtgtacaatgtacctcatgcacacctccatcacactactgcctgtttactaccgtaagacagtaagcttgcagtagcaaacctcaagacaaactttgctacaagctgctgccaagacagcaggcctggctctttaaaattgaggacccaggaactttcatccgttcatttaaacactcctggcatagaacagaacagatgctcaatattgattaatttatgtctattatctgcttttatgtactaagtcaaactcagttttttcacaaaacattttccagtaattctgtggcttcttcagttaatctgttaactactaaggatttatgcattgttttaaaatgtatatgtttacatttcattatgcatttattgatactcgctgtgtcgtttcccttcacactttatggttcccaagagtagactagctccccataaaaactgacagactaattcatacaataagcatttaatggcgatgaaaaaggaataacctgtttaatattaaagaatggtattcttttcttaaaattatggacacagtaagaatagaagaagaaacaaaatgattactcactgtgaatacctagctacctttctatatttttaagtagagaatgctgaggttgaatgaacttagactgataatttatataacatcaaatcttaatagtgccacatattcagagactgattttttttaatcttcactgataatgaggtaataaataccttgcactcatgttgtgtttatttcaggttgctgagatgatataggggaagaggtacgtgaagttctgtacatgtggttaaaagtaaataactgagaacaaaagaactcagataatctttctcatttcatccttcccaaccacagttcataagtctataatttatctaaaatctcttacgaagtttttaaatccagactttaaaggttgcactccaggaattttccaaagttattaattttattaatagtaaatccctttgatgaaccattttagagcattaaagcaattatgaaagcatttatcttttcaaaataaaattcaagtttaggcaaaaccagtggggatagatgatatttcatatagatgtactgcatattcaaaaagaaaagcagaaatgcctataaacagatgttcagtttttcaaggggagaaaagtcaagtcctgatctggaacttgaaaatacatgaaatgggagtgaagcacagtttcctggagagtgatcaaaaacagtcgagcctgactattcaaactcacacataccttcacgaaagcgttttctacaagccagaccatgtagtgctctgttgcttaggagctgggcagagaaatgctaatgaggcactgcctcggggatttgtcctgggaacggtgccatttaacattcttattagcaatttggtggaggaaggtgaactataagtagagaagttcctggtcacaatttactaaagataaatcacaaggaagtaaagggatctagaagaaactttggttggatttaggtacattaagggaccaatattatgacagcaacaaagctcaaagcacaactccaaggccatttacaaacgaaccaaacgaatgccattcttcttatttaagactgaagtcactaaagacagaggttactcaggctaaataaaaagggaaaccaacaatgccctcacttctggatagtccaatagcaaagctatgagatacaagatactggaagatacattagataatctaagcattacaaaagattaaaggaacaaaaaatagaaccatgatctgaaatgtctgcacagttctgttcagaacaccaaatctatggtgaacctatggatagctattctttctctctccaagcagaagttatctgccctctttaattcccatacagcaatttttagtttgtctcctcagtattttccacattgtgtttgagagctaggaccctgcctttgtactctgcacttctgccagaataacagattcccaataaataaatcattgttaaaggcagtatagtgtagcagttaagaatatgagctccacagcctcagactgtccaagtttaaatcctggtcctactgctaattaacttggagatcttgggaaagtttctaatcattgtgcttccatttttccatctgcaacagtaacagtaagcagtaggatcactgggaaaattagatgagataatacattcagtgggcttagaacagtatctggcattagagttaagtgtttaataaatgttatcagtcatcatagtggtggtacattaaagaatgaatcacttcataagtgactgacatacaagataaaattatttttctagattttccttgaatcaatgacagaatttctcccaaagtcaagtcttccacaattagataaaatacaggagccccagttaaattacatttcagataaataacaaatacttctttggtatactaaagtcccaaatactgcatggtaggagaagtctggtaggagcagcatctggtagaataagaagtttggtttgttgtactaagaaaaagtctctgaattttacaagtcactccttcctctttgaagaactactttccttctttatcacctttaggctgccctccttgccacacatttactttttaacatcaacaataaattgggccgggtgcagtggctcatgcctgtaatcctagcatgttgggaggctgaggtgggtggatcacatgaggtcaggagtttgagactagcctgggcaaagtggtgaaaccccatctctactaaaaatacaaaaattagccaggtgtggtgatgcactcctgtaatcccagctactcagaaggctgaggcaggagaatggctcaaacctgggaggtggaggttgcagtgagccgagatcacaccactgcactccagcctgggtgacagagtgagactccatctcaataagaaaaacaaaccacaatgaactgaagtaaaaatgagaattttaaactagatataggaatacattcttcctatattttctacttgaccaagtataccttgctcatctgctggcagaacctaggctcagaggagcccagttgggtgataccccagttctgataaatcaaaccatttagcatgtcttcaaagtctatacataggtcctttttccagccagcttgaactaaacagaacaaacaagtgtgttcaaaaaaacaaattggttttgaatacttacaatggttttaaaaagacagtggcaaaactgcccatgtcagcagtggtttatttggatcaaattaacactggcggtttaaacatgctaaagtgtttctaagaaggtgtgggctcctggaaacagatttgcatatctgcaaataggcaagtttctgcagagaccagaacatcttaggcatgtgtattatcccattttcacactgctgaaaaagatatacccaagactgggaaatttataaagaaaaagaggtttaatggactcatagttccacatggctggggaggccgcacaatcatggcagaaggtgaaaggcacgtcttatatggcggcagacaagagagaattgacagccaagcaaaaggggtgtccccttataaaaccatcagatttcatgagactcattcactatcatgagaacagtatgggggaaattggccccatgattcaattatctcccactgggtccctcctacaacacaggggaattatgggagctacaattcaagatgagatttgggtggggacacagccaaaccatatcagcatgtattaggttgtatttatgatatcgtataaagacgtagcatactatacattcaataaaagtagagctggttttataaatagatatcaaatttatgctctcagcagccagtaacccaagaaaataagctcacagaggatgccatcttacccctcagtactgatttgaggttgagcttggcttggcggtgcaggtcctcaacacaggggggtcttgtggtgggaaggaacacattctcctgctggtgccacggggcagtgtagtggactgtccatcggctttcctcatctaggttggaaaccgctatagaaaaaaagatagaatacattcaggtgtcaacttcattggctacgagttcattacatcatgatgtgtttccatgtctaacacatccacgggtaagggccagcaagggagcaatggagcaaatcctaaattagttttaatcttagattccaggggtctcgcccacagtgttttacttataaaagaaaagctgaaagtgtccaccctccaaacaatgttttcatagaatcatttgctcagttaactgcttcccagcattttaggtcctccctttactccaatgtttgaaaacatctgacagaattgatagagacctccaattcctacttaacccccctcgcacacacacaacaaatagcagttactcaactgtataatgccatcgcaacagtaaatgttagactgtcctgatagaaatgaatttcctaccaggaggtttataacaaatattctccctctacagcattatttaaagagcatcactgttataaactcaattacatttttaaaaaattaagcgtaaacattcaatttacatgtaaatgacatagctaatacatgtggagacccatttgtgttacaaaattctctctgcatttcttgctttcatgaaacccttttatattaaacatttttaaaattacaatgcaattgactcttcccaacacaatccagttcaactaaattttcccagcacagaagagaccaagacattagaggacaaaataacaggtaaaatcctgagagtaagataaatctctacaataatttttctttaaatcctcggaggcttgagacctctctagttcatttttcctgacaacacgagctaagttggggcatcagtggagcccaaaatgaggccgacagcaccaaaacaaattcatcaacaatgttttaatactttctatatacctgccatgtaacccaggcataagagagactggaaaggtactggagaaagtccttgtgctgaggcatttgcttgaggtagcaagtctaacccctgtaaagccagcagatacttgaattgtgagtgaggagcaagtcttcctgactctgatctatgctatagagttcacactgggcgtatccatgtccccaacataacatgtacctggaaactagaccataaaatgaattctcaaagtaacatgagaacacacgcataaactattaaatccatttgagcacatctaaaattcactaaacatactctatagcacagttattagggctactctaaagatcaaatgaaccaatatacataaagtacttagctcaagaaataactcaggtaaaacatggttgtggcaggaacagtaaaaattattctaacgaggccccaaactttgaactgtcactgtctcttgtaaacctgggccacatgctagcgctcatctcacataccatcttttctgcagctactaaattttacaatcttatgaatctgaacaggataactcattttcaaaaggaccccaccttctccgtaagttgctaaatgagaaaataaacattgagaactagatatcaagttaaaaacagaaatgtccattgtgctttctgcttagtatttgacaaaagcagtatgtgaatttggcacctagtatttcatgtaaactcttgttgagcaaatgttttgcatggtgcatacaactatcaatcttaatacacaaaatccacaaagacctgacttaaccctcatttgtgtttcagaagaatctagcattgggccaaactcaccatatgtccccccaaagtgtagccagagttcatcacagtgttttgtgctgatgtccatttattttaaagactgagttaccatacttcagagttagaaactattgaaaatggaaacttttcctattcgacaatttcaaatcaaatccaagtaatggcattcgtgtctgcaccatcaatcgcaccatcggccccactgcacagctaccaactggctcctatgaaaaagtctcttcccctcgtgttcctcactctcgccagggccacttttaatctgttcatccaaaggcagcctttagcaaggagctgcagaaaatcagcccaccgtgctgctctttgtagctttctccaaagctcctcttaccaatgcccctacccatgttcatttatccagtataagtcactggtccaaacactaaactaaactaaaataaaataaaccaccgactatgtaaaaacaaagccaagtagttataaaaattattattttcaagagaatgaagaagcacctacattaaagaaatgtaagtcaatggtaagtacacaataaagccacatcacaaaagttctgtaccttacaacaatcactgatcagtctagacagtttgtgctcgagctcttaaatacacaacaaagagtgccagggagtttcaggggattatctccaccagaaatatgtgatacattacacagaggctcccttacctcagctgcatatttatccaaagaatcaaaaaatcatacacttgatatcaagggaaacataaattaagtacaagaatttcccccctcttcaaaggacttcttttgaaaagcacagaagaagtgaattcacttaaaaccccaatcataaataaataagacatgctaagatcacataatactgtcctagagttacaaaagtctgaggtatttaaacaacctggtatagagtagagtttaactcatgcctattacgctgtttcacactctaatttcttcacacaaaagaacgaaggacctaaaacacacacatggacacacacacacacacacacacacagacacacagggacatatacacatatggaaacatatgcacacaataggtagtagagagaaaaggaactacttacttttcttcttaaaaagtttaattaaagacttaatctttgcattaatgaagaccaccatttccagggcacctacatagagcttagaaatgtaaatcacattaaaagctcagcccagtaggcaggtggcaagcttcgtccttctgctacagattctaactttttcttcccccggtctcatatccttagacatctgcccaggctgatgtaactgaggttgagtttattgtcaggcagttacaaaccattaacagtccttgaacctgaaaaactcctactgaaacctaatctttaaggctgagagcagccagtgacatcgtgcgctgaaagaaagagaaagccaatcacggttcttatttgcatgacagccacatcaggctttctgcctcagtgcccattcattcagttttctctccaacagatcagaagttcctcctctctgagcccacaaaaatagtgcagactttcctctacggaagtcaagatgaaacaaatgtgttccccatttcattaggcccctatgaacacccagatcttttacaggagctgccaagtctgacagcaattccagttaattcagggtatatgggatttgaactgatttaggggggaaaaaaaccaaactattgtttcccaaccacgccccaggctctgcctccgataccaaaggaacttgtacaagcagtaaaactttagaatagaatctccaaggagctgcaaatgatgacttggttgcatttttgtgcaaattaggatgctctgtcttctcacccttctttgccagtgattgagaatcagcattgtgtgttccaaagcatgatcttatttgcatctagctgccacaacaatcaagaaaaaaaaaaatccaccaaaaaaaatacaacttccccactccaaatgataaattagataaagtaccctaatcattttaatctttattttatatgtaattgtcacttaggctcctggttttcagaattccataatcgcccttccctcaatgttgtctcaaacaaacattatctgagttactctttaacttgaatctaccatccagagtgctggttcttttgcccattggcaattaaccacagagaactagggaagcacaagtagagacagagaaatcagaaacagagtataagaaggcactgaaaaaacatattccaggggtaaagggataggaaaaaagaggagaatatagatccggaaatactatgacaacggaaaaaggaaaagaatcttcctcacatctcagcccagttccacttcatggccaaacacttttgaaacaatttagacaacctcttatttcatagctttgggccagacttataactcaatggaaaaatgtaataatccactaattcaaaacatttagtttataacaaaggctcttagtcaaagaataaaatttatataaggggctctgtctagggaaagctttgaaatgattccttctcaggtctttttatgccctttattttttcaacaacaacaaaacaaaagaacacataggggaaagctttgaaatgattccttctcaggtctttttatgccctttattttttcaacaacaacaaaacaaaagaacacatagaaacgttaccatcttatcatacatattatcacagatttccaatttgtgttatttcattttatatatagctttattttaaagtaattaaattgccagatggcaaatgagaaacgactgagcctgtaagtcagattatgtggctgccttaaattagcgggcaaagttcccctttggaaaacaaatttatctgcaagagtgacctcgctctgctcattgcattagacacaaggagagttgtgggcaaaaacactcatatgcacaatccacaagtgtttgaggttaagtgtcaccatgcaaatgtccagtgaaaacagaaattgttctttcaagaaactctgattatgctcaaccctccatagcatgtagctttccatgtgctcaacaatggcatctgaatatagattcgttcatcagaaagataaataccaggcaccgatgctaactgctactctttcatttcattgggatacatcattggacaaaataggtgagatccctgccctcatggagcttaaattatttgacactgaactacaattttgtggtatattagaaggagttgagtgcaacagacaaaataaaaaagttaagcaacataaaagggggtttgagggtggccaggctgcagcatcgtaggagtcagggtggtcctcgtgaaaagtcgagatttgagcaaaaccttgaaggaggcaatggcaagaaaacaaaactgtgtaatgaatctcactggctctcattttaaagagagagagagagattcctcaggctgtgagacacatttccatcccccaggactagagaagtgctctttcctctcagaaaatgaactgtaggaagaatcttgcatggggtaatttcctttctcactcaatattaagtgtgatataaagtggccgcagttgttcctctgtatccattccaggatgccccttggatacaaaaatccttggatgctccagtccctgatataaaatactgtagtatttgcatgcaacctatgcacatcttcccatatactttaaatcatctctacattacttatagtacctaatacaatgtaaatgctacgtaagtagttgttatactgtattggtttaaaaatatgtattttttttattgctgcattacttttattgtggttttttccccaaatatttttgttccatggttgcttgaatccacggaagtggaacctgtggatatggagagccaactgtacttggttacacacgagtaagtggtaaacctgggggagaatgcaggcttccatcccggcatcctaggatgtctcatcctctgtgcattattccacactgccacataacaccataaaatccagatctccaggaaataaaccaaataaactatcacatttcttgcgttctatattaagttgtattttgaaagcacttattaattagaaagtttacccaatcaattgccagctcttactttacatccttgatatgagcatgagcacagggaaatgttttcatcatataatctgcatgcctcaatgctgtggttgatggaagagccgtattcttctggaactgtattttttaattgttcaatttatacgtgcaacagaaaagatataaatccatggtacttctgatgcctacttcagccatatatgacagtggcggaaaaaaaaaaaaagtttttataaagatagggtactatgttgcccggctgttctcaaactcctggcctccagcaatcctcccacctcagcttcccaaagtgtttggattacaagcaaggcccattgcacagggcaaaaaaagaaaaagaaatgttctaatgaactagacatgaaaaacttgacactaatgcataatagcgaaaagcagtccccctctggaaccatcctacccaggttaccagccactgaccagaggagtgacccctccatgccttggtttgctcatctgtaaaacgggataacaacagtgtttatatcaccaggtcatgatgaaaactaagagttattattgataaactccttagaacagtacctggtatgtaaacatacgtaagtgtatgttaaatcaatgaataaaatctcaagagatagcttagcagccttctgcttaataaagggccatgctttcatgcaagggaatcagtgtagcagaccccatggctgtcttcctacttgtctctgacttaaactgccaacacctcgagtaattgctctataccccctgcttccaatttatatccacatactatcttttctattgtctaagattttatttcaatttttaaaaaattctcagtggtcatcggtgaatttctgactcctactaatggtgtttttctttctcctcaccttcctaatgatcttcttaatcatatacttccaaccacccagctcttgatcctcttcattgacactgcaacacactagttcctctcctgcatatgatggctccttctccgaattccaacaaagtctaaccaagcttcaaagatctagtccttaagcctttgtcctatgctatttacttatttccccttgaaacttgaatggttttgttagtatagagcagaagtcagcaaattatgaccctctggccaaatccggccattaaatgattttttttaaagtaaaagaagaagactatttcataacgtgaaaagtacatgaaattcaaatgtcaatgtccaataataaagttgtaatggaacaccaccacacccatttgttcaaatattagttgaaatattgtctaaggctgctcttgggttgtaacagcagggttgagcggctacgactaagactgtatggtcctcaaaactgaaaatatttactacctggacctttaagagaaaaagacggctggctcatggcttaagctactgcctttaaacatcctgctcaaccttcatttctattatcttccatttgtctgccctcagttccatttgctaacctctactcagatttcacattatctcaagttcaacatatctaatttgagacaatctgctttgccccccaaactgtttctcaggaactatttttacatctattaggactatcatcttttttttttcctccatgaaccagacaggtaaatttaatccccagttaaaaaagtaaaaactgaggctggatgtaatggctcacacctgtaatcccagagctttgggaggctgaggcaggaggactgcttgaggccaggtgttcaataccaacctaggcaacccagagagaccctatccccccaaaaatacaaaaaaaatattagcccggtgtggtggttcatgcctgtagtcctagctactcaggaagctgaggcaggaagattgcttaagcccagaagtttgaggttgcagtgagctatgatcataccactgcaatccagcctgggtgacagaatgagaccttgtctcttaaaagaaagagagagagagagaaagagagagagaacgtattcgctgccttgtgttaggtgtccaggttaaaaattaatcaaacatgatcattgacctttggaagttcacagtctagtggaaaagacacacccacacagataaaaatgatgatataaagattaagtctagcgagagagagatgatggtgaagttcctaggtaaaatgataacacacatccacctcatttaaaggaccacctgctattagagtacagagaagagactcttgggtaaagcccagacctgggatgtggggagatatgctgaaacttcggtgaaagctcatgggacagccctgtggggaaaggtggtggggaagatggagagaggcagggcaggcccgcagggtcttgcttgccaccgtgggtgagtggtaggtggtggcaagggggtccctgatggaggatcagaggggaacctgtagggccagtgctgcattttaactagaactctggtgtcaaatgacaagtaggtttgaataggattgaccagaggcggggagagaaaatggtgccacaatccacacaaaatgtgaagaggtcagaattcattctcagctcagaataactttctttctctagaacaacttggttttatcagcctatgtttcaccacctgtaaaatgtttcaggaaccaaataaacctaaagtataaagttcaaaaaattaaaccttggccacttaaataaatgactctgttacgacccatgcttttatctttagtatgatcttaaagtacaccctcattatttttatgaaggccaaagattatatgtctaaacctaaaagcttcttaagagcagagctgtctacagcttctagaactcagacatagccttgcccatccccgcccccatccctatttacacaaacccacaggccctcctcagtgtatcaaatgcagttaaggtactgaaagtctttatttggaatccaaaaactttttcacaaatactgttaaacaatattgactaaaaagggtcattttcaaatattgtacacaggagtttatgcagaaatgagccatgtttatatcatatgtacgcatttcgaattagataaaatttgaatctttgagcaattgaaaatgaaacaggggctgggcatggtgactcatgcctgtaatcccagcactttgggaggccaagataggcggatcacgaggtcaggagatcgagaccatcctagctaaaatggtgaaaccccgtctctgctaaaaatacaaaaaattagccaggtgtggtggcacgtgcctgtagtctcagctactcgggaggctgaggcaggagaatcacttgaatctgggaggcggaggttgcagtgagctgagattgcgccactgcaccagcctgggcgacagagctagactccatttcaaaaaaaaaaaaaaaaaaaaagaatatgaaatatacaatcaatgaagatcattattttcttccaacctgaagaggagaaaggggaaataaaagtcagacataatagagttctgctcagggctgtgtattaaatgaccgtttgaaatgcttctcaaaggaatttagctcttcaaacagaaaatttttcagggcaaccttatctataaatggtgcttttactgattgttaattcattttagggtgtttttaaaaatcaagtttaacatctagcatagaagactgtatatgactaaggtaatttagatgtcatctttatgcatggttaaaatacttcaaatacgatttttaaatctatagacacacccattcattcttatgcttttcagactcattgaaacattggaaaacatcacagcagaaagcacaacccatgcattctgggccaataaaataaaatgtacagagtagtaagggattttagacatttctaaaaatttacatcatctacttaataaacattcataatgttttaccaatagataaagataatttaggcctatcctgtttattaaggaacaaaatcttcctatgttaactcttgaaggtaagaattatgtttcctgtttttattaatagtttcacattgagagcaattatgtacagtctgtaattcttgtctagcaaaataacagttttgaattattattcaaacaattattactgaattattgaagctgcaaagcaaactagtaacacaggcaggtaaattaatacagtcaataaatgtgtaaataaaatggcaacttttaaaaatagggctgccagataaaacatatgatgtccaaataaagttgaattccagatagataaaaaataatctttaaatatactatgtcccaaatattgaatgggatacacttatgctaaaatataattcattgtttctctgacatttaaatgtaagtgggcatcttgtatttggttaatctggaaatcttaaagtacaattttaaaaaattatctaaggtcatagaatagtaagagtttgataggagtagctggaagaagaaccattggttagtaataaagatttattcttcaacagttgacattattaaaggaattttcaaaaatctacagtaaaagttaatacaattataatttataatgttaaaaatcactttatttgatatggcagattaaaaaaactacttaagattaatcaagacaaattgagtggacttataaagttcctgctgctgggcatttattttgactagaaacaacccaaaagatgaattggtcacttgtgccttaagaatcaatctctaatttttttgcatccggcatttttcttacagattactactgttcatttcttagtagtctaaatcttagatatttgaaccttctatctttctttgtcagttttaactccctactgaagagctgccatgtaagaggaatattagagcagccacacagtggaagaaccggccaggcatctccctaatccagcaaacactaatggtgggcaactgatatgttatgtccactgatgtgatgaaataccaagtacaaacatcacctatggtaaatcaaagttttttttgacaggttaaattatcccaggttataggaaataaaagagctggaagaaaaagcaaaagcaatcagtcttaacttaaagtgggacattatgctgatctggcctctccaataacttatcaaataattaacactactactactaataataatgggaatgtgccagattagaagagatttaaagaacatcacaacatgattctggatgggatgctagttttggataaacaagctataaagtcttttacagataagtggaaaaaattgaatagacactgggtgtgatcttacacttatgctctcaatttttacagttgcataatgaggtaaacagaaacacatacacatttaaaaggtaatgcagagatactgtccacagaatgaaaacaggaatctgataacagatactcatgaagagttattttaactgtcccacgaatgttatttcacaaaagcatgttaaaaatcaccaatattctagaatctcatgggtacaatgaccttttctttcttctgtttctgaattaatctttaatgatgaaacatatgacatactgaaaaaaagacaaatggaaatctctctcttcatcaattatggggttgggggagtggttggggacagaaaggggaaccttaggagatgataatgtatcaattctttagaagaaacttgatctggcatccactttgccagttaattttgatgctaggaaacaccctttactctgcatgtgctgaagctaaaggcttctgctgtagatcctagttaataatttaatccaatatcattgctgccatcggcttggtcaatttctaaacatctgctatcactgtgactggtttagccaagccacaatattcatgtgacaaatgttgaacaaacgaaaggcgaggcagacagaaaacatgctatgaaaaaaagaaacccaaatcaaaagtccaaaacacaaagggagccctgctgacacagcattcaaagttcaaccacgcctgcaggaatggaaggctgcaaagtcgctctagtgcatggctgggatcatccagagactgtcctgagatgttagaaatgaggtcgggctaacatggtagagctttgtgaaagggatgggtgctgatgttggaattattggtgagtatggaaatagcacaggcaaatcaaaaaagggagatttcataggcccctagaaagttagagctgaagaaagtcataaggaacatttaagacaattttacaaataagtgacctgcagtgatcacagggccacccagcatctgtactgataccccatcttgtggtccagttttcaattccatgtgctacttgctgccttcagtaagggccagtgaggtgagggatcccactgtccacactctttccacctctatgcctttgcacatgctattaatctgcctcggatgcttgatcctccgcttacccacttggcatacctctattcatttttcaagttataattcaaatgttaacctttcttaagaagcattccttgacagactgtcactctatttcaaaaatatgtcactttatttcaaggataacttcccccaaagtgagctatgcctttcttgcagaaaaaaaataatttcattaactgtaacctcttatacttgaaccaattattctttgtgacatgttatacagccctaatccatctacccaagtaatacaaattcatcgaattcattctcaaaggctatactaggtatataaaggctcatttcaggagagaaataatgtatataagtagagctacatattgatgaactcaactgtaaagttaactcacttggcctttcccaattcagtcattcaaaacacattttctgaatgcctataaaggatctagaacatcttagagaatacttttcaatcacttagaaattaaaatttatttcctgtgctatttatacttaacataatcatacatttacaataacaataattcaaacaatgaatcgaaattttatagaaaaaaattgatgcaacctttcttctaaaatcttcagggaagaaaatctcattgtggaatgaaaagtcaaagtatactatgatgatcctagagatctaatttaaaagaattgtgattagctaagtgctttatactctgagctccctcgtatttttaaaattggataatatcaagaacctgtttgattgatggtgtggtaaaacctacaaagaatctatactcgaaagggattttttaacgtagaaaaaaatgagagcaaaggaagacttcctaataaagactaccaggagaaactgacaaaataaagtagaaggtcgccacctacaggggacaccatgacactcaacgacacactggtgcatgaaaatgattccctcagctgtcatttacagaagacaacatgctctcattcatggtcaagtctcaaaagaatatccttgtcttccttcaccagagaaagacatattctatgatccctgtgcccttttgagcctcaattcggacaacattgacatcacaccttcaaaaagatttgtgaatattcataaaccacctagtgtctgcaaccaagcccacattaaggaagtacccctgagttatacaaaacatttctaaatcaataagggggcagctgtgtttaactgaataacagagctaagaaaaaaatttacatcaatttataaccaaaaggtaaagccttacacaaaggagtccaaaagtgttttcatttggactgatgaagattctgaaatcactctgtccaagaatacaaaatacaacctaaaatgactgaaggcaaatcagatttatcactgtctaacttcttcccaattaataatcaataagtataaagatttagagaaaaaggatagagttaattatttagtaagccatgaaacaatcgctgtgaacttgtgttctgaagattaactggctgttcagtttttcttttctcagtttcctgtgatttctaatattgtttcacatatggttaagatgaatgctacaattaatcggctggtgtgctcaactgcttttgttaagaggacagctggttcacatgcaaaatgctaatgagacaaattagaccattttggtttgctgatgaacgaacagcaagacctatagttaagtctccagctgtacttggttttctagtaatggtaaaggttaacctaaatgaggataatattttatttgattagtgttggatcttttcaaaacatttttttcattgtcctaaactacagaatacacagcagcaaaattctccaaacagcaaaatcacaggttcttatgaagcatgagtgctacaagggttttagaattaatggcagaagtgaggcataagagcaaagaagctcagcctgacctaagatgatatttgaattcacctagaaagtacagaacttccattaatgtcagttagccaaagactttttaagtaaataaaaaccttcctataacctcaatttttcatattcgttcactgatttttctttcaattcatattgaaaagaccatttttaataagtaaacatcaaataaaggcaagggacaagaacaaaaacatcaatcattgtatggagacatattgtttagtatctctaaattctagtaccctggtatttctaaagcaagaatgtcacaatgtagatttctgacttgatgccacagaagtacctccaggcttctgggtattccctgttattagagggcaatacaattgggcacagatggaagggaaggaaggtgcattgattgcagatcccacataatttggcccacacagaatctgagaaaaaaatcaaccaggaagcgaaacgataatgctaattctaggtaatggcactgactttgtaaaaatgatacgcttagctcttcttcatcagcatcatggaggcttggaacagaaagcagaaaaataacaatggcattcttcatatcttagcaaataaaatcatatttggaaggactaagtaagatcagcaggcttcctcgtgtacctaacaatatttttaacttgcagccaaaactgaagcttggcattgtaaaggcaggtatggagatttcataatttggcccaaagtttgttttttactaaagaaaaaaggtgaggtagacaaaaaaccactgagagagagagagagagtgtgtgtgtgtatgtgtgtgtgtgagagagagtgtgtatgtgtgtgtgagtgtgttttgaagaaagtaggtctatggggtctcccaatgttgcccatgctggtctccaacccctgggctcaagtgatctgcccaccacagcctcccaaagtgctgggattacaggcatgagccaccacgcccagccactataagaatttgaccaacaatgaagacatcgatgtcttcctggaactaggaaaagaaaaataataggccaggcaaagtggctgacgcctgtaataacagcactttagaaagccaagatgggcagatcacttgagcccagtagttcaagaccagcctgggcaacatggcaaaaacccgtctctacaaaaaatacaaaaattagcagagcacagtggcacacgcctgcctgtaatcctagctgcctaggaagccaaggttgcagtgagccgagattgctccaccgcactccagcctgggcaatagagcgagatcctgtcttgaaaagtaagatatctgagggagaaaataaacagggtcttccaatgccaagcagtttttccaaacttctcgaaaattgcatagcagctctcagaagagtcagatggatccacttgtatcacctcatctgaaacacctatctctttgtgtgctgcaatgcatataaatcattatgtgataaaacaagtttaaataaagctgccacaatcaattctcattagcaaaccatatttaattaagtatacatttaggctgctgagggcagttttaaaatacctgcactttcccatgcttaatgtttatgcacaatcatttttaatcagacaaatttaattatcttattacaactgctttctgaagagagatactcaccaactgcaccccacgggaaagaggaatcggtcacagactccagacaatatattacattcattatcaaaataaatcccagagcatctatggagaactcgttccggcacgatgtcccatgttaaaataggataaaattcacttctttgctcagtaacctccctcttcttcttcgttaatacaattctaactgctcgtcaacaggataactctatattctgaactttctagctttacttgaattgtttttaacatcccccgacaccaaaaaagaaaaaaaaaaaaaaacccagcctcttctttctgcagctgctgaatgccacaaatagcttcttgtataattcgacttagaatgcaccccaaactagatgtgttcaatggcaacgtgaatgcttcattcagagagaaacaaaatgtgtagaatgtcctaaaaacatcacagtggcaaaggggatcattaagaagtcttggggcagacgaccgctttcagcccttgcctgcaaattcttctcaggtctatgcacatggcgagagaaaggtttcagaagattcccacagtgatcaaaggaggaatcgctaattcccctcagcctgccctgtctagatggggttttccccggtgttacctcccttctccacaactaatgtgtttcttcctcctggtttcctaataaaatgcacctaccctcaatctgttcgtgctctgccatcagttacccagacctaaactaacatgttcatttaaaattcgtacttgatgtgctatgtgttctacacatggcagacaccccctctgatatttctggaagctcctggagggccagagccaactccatgcccttcactttgcacagtgccaacctcggtgccatgcaaaaccagctgttgtgaaaatggatacaatgggacaacaggtaacattcatagaaatgggttgggaaggaaaagagcctggcgaactttaaagcattcttgtcacatagtgccataattttctaacctttatgaaaattttccttaagaaacgccttgcaaatactaaacaaaaatgtccacacatttatgaataaacctaacatttattcatgaatgtaagtaacttttttttttctttttccagagacagggactcactctgtcacccaggctagagtgcagatcccagttcaccacagtctccaactcctgtgctcaagcaatcctcccctgcttcggcctcccaagtagctgggatgagtaactttttgaaaagtttccctgtgtgttgaaattggattttattttcttgaataccagatattttggcaatcaaatgattacaggggctggtgggtaaaggaagaagcaagagttatcttagttgctgtgtaaagagacagagggccagtggattggccttttacccactctcttcccatcatccttcgggtctcagattaatttgccatttcttcaaggtctgaattggactctatttagacctcccattgttcactttcatcgaaacctatacttttcttctatatcactactacttgtagtgatttgttcaatgactaatttgtttaatctcccactaaacacatgatctggaccatgatacagaggccatggctcactgaacctacagcaacaaggtgcccagtgccaggtttgatacactgtgggcatgcaattcatattattttattaaatgaatgaatttaatacagcaggaaaagaaatagtttacattaccaactctaaagactttattcttggccaggcgtggtggctcacgcctgtaatctcagcactttgggaggccaaggcgggcggatcacctgaggtcaggagttcgagaccagcctgaccgacatggtgaaaccctgtctctactaaaaataacaaaaattagccgggcgtggtggtgagcacctgtagtgccaggtactcaggaggctgaggcagaagaattgcttgaacccgggaggagggggttgcagtgagccgagatcacgccactgcactccagcctgggtgacagagcaagactccatctcaaaacaaacaaacaaacaaacaaacaaaacaaactttattcttaggatgttaaaaaaaatacagtagttctcccttatccacaaggaatacactctaagacttccagtggatgcctaaaaccacagatggtaccaaaccctacatatgctacatttattcctacacatacatatccacgataaagtttcatttataaattaggcacagtaagagattaacaataataaaacagaacaatgacaacagtatactatagtaaaagttatgtggatgtggtctccctctctctttttctctctctcaaaatatcttattgtggccaggcatggtggctcactcctgcaatctcagcactttaggaggccgaggcaggtggatggcttgagcctaggagttcaagaccagcctggggaacatagggagactctgtctctacaaaaaataaaaaatacaaatcagccagatgtagtggctcacacctgtggttccagctactcgggaggctgaagtgggaggatagcttgagcccagaagttcgaggctgcagtgagctgtggtcacaccacggcattccagcctgggcgacaacacaagaccctgtctcacacagcaacaacaacaaaaatcttattgtactgaattcacccttcttctgaggacgtaagattaaaaaaaaaaagtgtctacatgatgagataccacgacagatctgataactgtgactgacgggcaggcagtgtctacagtgtggatcagctgaccacatcctgggcaggatggggcaggagggtgagagagttcaccacacttctcagaacagcacacaattcaaaacttatgtattattatttctaaaattttctacttaatattttcagatctcagttgaccatgggtaactgaaaccacgagaagcaaaaactgaggctaacaggagaccgctgtaaaatatctgcagccactaagattggcagggagcttttaactggagacaaaagttcattcacagaaatcagttcattcatcttcagcctcatctcattcattaaggactcaacacaccaaacaatactctaggcaccagagacatcaaaacaaagacaactttctcttatgaagccttctctgactttttagtctttcgcatcctctccccaggagggtggatttttcacttatttatggcttatccgctccataattgtgctcatttgtcttccctgctaggagctgtgctcctggaggacaggaactgggccatattggctttggagatgccagtaagttagttgatcaaatgatgcaataaagaaataaactatctatttcttgtccatcaggcattctattggacggaagaagacagaattcaataaaatgggaataaggtacattttaaattaggaagtgcataactctaacggctggaagttaatagtatcggggaaaacttgacgtagcaggtgacatgtgagctaggcctggatgggtaggtaaacgtttgctagaggaaaacagatatgaaacacattccaactcaacaagagggcataaagaagacagtgaatcgtctggagttgggaatactgagtgtgtgtgtcatgaaggcgcacgccgtctctcacagtcccaggcaagtcacctccttgtccagtgcaccacaatgagaggctgggagttggaaaccacatttcccagactctttgacacaggggcctcagcagccggcctagcatttgcaaagcagatgcacatgactgatgatacaagtcctcatttccatgctcctgcggcttcggctgtttctgctgctaagtctgactgttgaggtaactgaagtctcagtgtgccatccctactttcatggaggtgggaagcaaggcatgtagtgatcattttgctggtaaggtacacagctgagggagtgtgggcgtggagtcaaaacctgggtgccagctttgactgcggcagagataacagctcctttggccagctgagagagctatgcctgggtgttcagcttgggcctattcctaaaggtttttccaatgatcatgtagataccatatactctattttaaatccccgtctgcttacaatgttgtctgcaactgaacgtgcctgagaccatctgctggcctgctgggatgacaaagtggggtttgtggcaatggctgtgggagatatggctagaaaagttaagtcatcactggtgtcaagccaaagaccttagaactctcagttagcaatggttgaacatcaaagttgttttgttgttgttgttgttgttgttgttaatttgggaaaataggcaattcgtgtttttgtttgtttgagacaaggtctagctctcttgaccaggctggagtgcagtggtgtgatcttggctcattgcaacccctacctcctgggctcaagtcatcctcccacctcaacctcccaagtagttgggactacaagtgcatgccaccatgcccggttaatctttgtattttttttagagacagggtttcaccatgttgcccagggtggtctcaaactcctgagctcaagcaatcctcgtgcctcagcctcccaaagtgctgggattacaggcgcgagccactgcatccaggcaacatgaaagtttccatgcaaaatagtcttctgtgttttagaaaaacgttagagacatagaaaactaaattttaaaaatagacaaaatgtttaaatccaaggtgaactataatgttgatgagaaagggatggaagtaaacagtctatcttctgcacaatgatttcccccatgcctactctttggctgtatcataacactttctgcctctcttaagtgtgttacctagtccaagacgacaccaacagtccaggaggtaggatactgtcacattctgactctacttagcctctgttctcaccagactctctgatttcatgttgttggagaattctggatgaatatttcagttcctgattattgcctgcattgtcagactgatttttttctacaagtagggtttgcagaaactggatggtcatgattaaagcccatgaatggaaagtaacaatgacataaaaagctttctctgtattcattttttaaatgctgagttttccccaattttagttatatacagttctgaagtatcacatacattctgataaagaacatgtaagatctaaccactatcagtatttagggaaagaacatcagattactgaaacaagacagccagtgccttgttaaagcagatatgaaagcaatgtctgagcacttagaggcaaacaatagaatccagtttcatcatattaattaagcaaatcctatttattaagagatattaaggagttctcagaatctccaggagggccagaggataagtttacctgccaatcagccaggactgtaacagtgaaacactgctgctgttgccacctgctggtcatcacagagcatgcgcaagtgtggatgcctacacttgtggagccactgaagcagctcccagagcaggtcagtgctgctgggcttgccagtagatccagacaacctactcagctactgcctaacatccctcagtttgtcatccacatccaatgagtgggtcagggtggcacagcctaggtcacatacctgtactgtagctgcaagggagtctgggaagcgaacgttgttagttctgtggctggttaggggaggaagtcaggtcagatggtggggaggggcagtagggagtgggacaggactggagtgagaaactgctgcaagatttctggacaagttcttcagtaagaacaattactaatataggttccaaagtcacctgagatttgtggtctcttatttcagttttgcttcaaatccagaaatacagttatttattaatacatctgaacttcctgaatcagaaactgaagagtgtcagagaactctttgactcaaattgtatcagtggcccacaagaattcacccagtagcatttaacagtgtcacctgctaagtctatcaactcaacacagtccaggtttggtttctttccatggactctctttctggagagctttaaaaaattacagcaggtttttttttttttcaagagatgcacaaattcacattatataagaaaaataatagaagtgagggtagaacgtccacaggaatgatttttttttttttttttttagaaaaacccagagcatttcatgggttgttgcaatctcacttcagaaattaacaagttaaattaactcactcttccagctagcctatataattaaagttggaaaaaaacaaaaacaaaactagaaatgtttatgtttggctttaattcttcactacatactacgttctaatggggaagacagtaagaaatccaagcactgacatagtaacttcaatagaacattctagaatgccactgaaggccaggcgcagtagctcacgcctgtaatcccagcactttaggaggccaaggccagcagatcgcctgaggtcaggagttcaagaccagcctggccaacgtggtgaaaccccgtctctaccaaaaacacaaaaattagctgggtgtggtggtgcatgcctgtaatcccagctactcgggaggctgaggcaggagaatcacttgaaccggggaggcggaggatgcagtgagccaagatcgcaccactgcgctccagcctgggtgacagagcaagacactgtctcaaaaataaatgaataaataaataaataaataaatacatacatacatacataataaaatgccactttagaataaaacactccacagctaaccatctaatgggaaaatataacttttctgagcaccactgcgtaaataagcctcctctgaatgacacagaaaaaaaaaagccttaccatgtgtatagtaacaactaacaacttcaatagtatttttttcaaagcataatttagtagtagaaatttaaaagaaagtgaatcttcaaaaaaaaatctgctctgtcacccaattttccttttgataaagcaatgaccttaaaaaaatgtgttatcaaaaacaaatggaatttttatgtctctcataactcaaaaatatttacttcttcataaacacccaaatattgtaataaaagcattaaatattaacattcttgtctttttttttaaaccagagaaatatcttagatgaagaaagtaatttgctaccatcacaatacatgaataatttaatatgcaaggctggaatgacatttgcacaagatttttttcccattgtccatgatacatcaaccctgtgagaaaatcaacagaggagtgggaaaatcttgtgaaaaatttttacaaacaagcacagtgtctgcaggttgctgtctggtgctagtttcttcttgcacttcagaaaggatacatcttcacacatacttaggcatctctagcaaggtagctggagaaagatctagaacacttacatgggcagtatttcccattccctccatttcagtattcagatagagttgattggcaactgtttgttccatatttatattactgaaatactctttgttttaaaaatacatatttgagagccatcccttaaaaagttgataaagatgaagactagttgatcaaaaattttcctactccctctcaacctttttcacgttttatactttcccagctgccttcaatcctttctgaaacaaggggaatacagggtttttcccataaccgttggcattcagtatacaattcattattgcccaaatccaattgttatgtgttctttaaggttagtgacaaagaataataacaataataacataataaggcaaaacagattgttttaaaagaataaaatataaatctacacagtcttggcatataaaatcataccaaaataaatatcaataactaaccaataaaatttcaaaattggacacagttctcccaacactgagtgctggaatacgctgcctagtttaattctttttttttttttttttttttttttttgagatggagtcccgctctgtcaccaggctggagtgcagtggtgcgatcttggctcactgcaacctctgcctcccgggttcaagcaattctcctgccctccaccttccaagtagctgggactacaggcatgtgccaccacacccagctaatttttgtatttttagtagagatggggtttcaccatgttggccaggctggtcttaaactcctgacctcaggcaatctgccctcctcggcctcccaaagtgctgagattacagacgtgagccactgcgcccagcagtttaattctttttacacttgtatataaccttgaccaagttaatctccctctgctggtaaaaatgagaatatttctcagaaatattttccaaatattttaccacagatactgcctatgacagagcctgaaagaacaactgatttctactttttgtgacaaacacatgggcttcaaccagatctctttggccactgtgtggagaacagattgtgcatggacaagtaaaagtaggaagctactgtgatcaactaggaaagaaatatggtggcttgaacccctgttagaaatgagacaaatgggtggattggatataatttggaggtagatcagtgtgaaagttatcagtatcaaaatggagccactaatgtcaaacccaaaaaactgaagccgagagaccatgaaggtggggccctcatacaggtatgcctataatgggagctatgcaagggattcctcaaaaccacagtattccagataaactttctgcacaagtgcacacctatcaggtgtgattgtctccaccaattagctaatgccaacatctacaacaagtccctgtaaccaatagtattcgtttcaaaacagcttaggtggacttttcctttttgtctttaaaagcctcccccaggccaggcgtggtggctcacatctgtaatcccagaagttcaagaccagcctgggcaacatagtgagacccccatctctacaaaaataaaaataaaaaaattcactgggactgattgtgcacacctgtggtctcagctacttaagaggttgaagcgggaagaccccttgagcccagaaggttgaggctgcagtgagccatgatcacgccactgccctccagcctgggcagcaaagtgagaccctgcctcaaacaaaacaaaacagctaccccctgcctcacccccctggaatatgcctatggtttgacatagcatgagtattctggattgcaatcccctgctattcccaaataaattctttgctttggaagagttggtctctgtcacacattttaggttggcactggaaaggattagatgtgggacagaagaaagaggaatcaaagaggattagagttttttgctgaaggtgcctaagtgcaggctggtggtgctatttattggggaggagaacccggaggaaacagtggctagaagataattagatgggcaaagtggaacacctcatatgggcatggggtctgcatcataacagaggtcagggcgggagattttaaaaactttaaaattagcctataaaaagatacttaaagccacttaaagagaacatcaagggaaagagggcaggaagagaaaagaggaagactcttggtcagaaagaagaggaggagccttggaggaggcccagaagtgcagccaatgacttcaggaaatccaacagaggaaactgtttcagctccctagaatatgctagtaagtacggcaaagtcagaaaagtgagcattgcgtctggccacgtggaaaccgtgaacaccctggagaacaatcctgtgatactgtggagccagaaatccagagtcagatgcactgaagaggaggtgagaaagcagatcagatgcagacttttttattattaaattttgctctgaagataaatagaaaaatggatggcccctgaaggacatgtgaagtcaagaaagtaacttcaaaaatggaaatccatcactgtaacttccttgttcaaagaatgtttggagcctgggcaacatagcaaaacccgtatctacaaaaatataaaatttaggccagttgtggtggctcacgcctgtaatcccagcactttgggaggccaaggcggatggatcacctaaggtcagcagttcaagaccagcctggtcaacatggtgaaaccccatctctactaaaaatacaaaaattactgagccgtggtggcaagcacctgtaatccctgtaatcaggaggctgaggcaggagaatcacttgaacccgggaggcggaggttgcagtgagccgagatcacgccattacactccagcctgagtgacaagagtgaaactccatctcaaataaaataaaataaaataatttactcaggtgtggtggcgcacatgtggtttcagctactcagaaggctgagctaggaagatcacttgggcccaggcggctgaggctgcagtgagccgtgattgtgccactgcactccagcctgctgacagagcaagatcctgtctgaaaaaaaaaaagtttactttctctttgagctctcttaatttgtttgagtctatggtgcactgaaaatgaaaagcctttttagatttacataacaaaacaagatttaacaatctgggttaatgaatgacaataatcttcaggcggaaaggctaggaattatttcctgaatgaatgagtttcattaataaaataaaaggaagggtctctgtccccccacccccaccctttcatgatctctctgtataacattctgtagtctaccatcaactaactggcttggtgcagattccagaacattcctggaaggaatcactcatctgggcagaatatacccactaaggtccttagggaaagtcaggccaataaagttttgcggcacaccaagtattttctgtatttatgagaaaaaaaattaatggtggggcaggggaatggtggggacagaaggggagccagagaaggcagtgaattaaagagagtttttaaattttgtttttattttattttattatgttttagaaatagggtctcactctgtcacctaggctgcagtgtagtggtgagatcatagctcactatagcctcgaactcctgggctcaagtgatcctcctgcttcagccttccaagtagctgggactacaagtgcgagccaccacccagctaactgtttaaactttttgtcgagacagggtctcgctacgttgcccaggctggtctcaaactcctggactcaagccatcttcccgctttggcgtcccaaagtgctgggattacaggcatgagccaccacacccagcctagagatgttttaaagaggaaaaaaaaaaaaaaaaaaaaaaaaacagagctaaaagctccaggaatagaagacaggagactgacacaggggaattcttggttggttttactgacatgaaatgattatgaatttgaagtactgaagaagatgagtcatttgggatgtgacatctcctttgaatgggaaagcccaaatcctatgccataggtccatgctgtaggtctagcctgcagccaaatggcaagattgcttgtgtcataaaaacatagaatagtctttagggaaacaaaataaaaataatagcaaaaagttaattgtgcttactccaggctgggaattttatgtgaatgatctcattgaactcacattacagacctgagatgtgtgagctgtgattatgcccatttttggagttgaggaaatgaagactgagtaggaagctaagtaatttccaaaggccttaagcttgccaagtggtggggtgggaattcaagccaggtctgggaccctgaaggttccctcctatttacctctgaagaatgagcacttacctgagtaaatcaagaagcaagccccacacaggctcacacaaaacaggggtactgaaagctaaaattaagcctggtgttaagcagacttttcattgggtacagaaaagagcacaaattatgtatgcagctcaacgaattgccacaaagtgaacgcccatgtaaccagcacccagatcaagatagagatcattaccagctcccaagacctcctgttcatgccctccttgcagccactagccccatccccacacataaccattaccctaataaaatcaccatagattagttttgcctgcttttgaactttatatggttggaatcacactcttctgtgtttgtgagattcatctatgtggttgtgtgtagcagtaacatgtttattcttattggtatggtaaaagattacttatctgttgtattattaatggacatttagtgtttttttttccagtttggggcttttaggaatagtgcactatgaacattctcatgcatgtcatttggtaaacattaagtatctcgttatggtgggtataatcccagaaggggaatttgctgggtcagagtgtgtgcatagtcagcttcaggagatattgccaaaaagtttcccaaataggaaacactagtagagtgatttaaaggttttcttccctagcaaatgggcacacaaaaaaatattgaaggatctcataaaacgttaccagaagcccattcttaaacatcagaaataaatttaaaagaatacttaaaaatcatctgaatgacgggagccctgcttgccaaaggtttgtgtaataaaagctaaagaaaaatttggctgaaaggatcttgaaaggatatgtgtaagtggcaaatgggcggctacgaaccatgatggagacagagcagctttggcccaccatggacatttctagtcctcaccttgccaggtgagtcctggaagcttaatgtctctgggcgttggattttttacctctgtaatgatagggtcgcactagttgagctctaagttcgattctgggtgcaatattgtgtcatacagacaaaaaagataatgtttcagccctatcaaaaacaagaaggggctgagcacggtggcttatgcctataatcccagcactttgggaagccaaagtgtacacacttcttgagcccgggagttggagaccagcctgtgcaacatagcaactctctctctctctataaaaaaattaaaaagtagccaggtgtggtggtgcacacctgtagtcccagccactcagggtggctgagtgggaagatcgccagagcccaggaagtcgaggatgtagtgagctgaaatcattccactacattccagcctgaacaacgaagtgagaccttgtctcaaaataaataaataaataaataaataaataaataaataaataaataaataaaaagggaaagatgcagtcctatatgctcactctataatgtacccaaagctagactatataaaatcaggacgtactttgttgccaaataaaaaacaaaataaaaatgaaggttagctgggttgatacaatgagggtacataggggagttttaatgacaacttaagtgttggagaaatactttgggatctgataaggaaggcttttagaaaaaagaattatttgaaaatatttgacctggccaggcgcagtggctcacacctgtaatcccagcactttgggaggccaaggtaggcagatcacctgaggtcaggagttcgagaccagcctggccaacatggtgaaaccccatctctactaaaaatacagaaattagctgtggtgggaggagcctgtaatctcagctactctggaggcagaggcatgagaatcgcttgaacctgggaggaggaggttgcactgagccgagatcatgccactgcactctaacctgagcaacagagcgagactctgtctccaaaaaaaaaaaaaaagaaaatatttgggcaaaaataaaatagaaagaatagaattttaaacatgcccttgagttcccagatcataatgtcaaaacattctattttgtagccaggtgcaatggctcacacctgtaatcccagcactttgggaggctgaggtggatggatcacttgagcttaggagttcggagccagcctgggcaacatggcaaacctctgtctctaaaacatacaaaaattagccaagcctggtggtgctcacctgtagtcccaactactgggaaggctgaggtgagaggatcacttgagcctgggaagtcaaggctgcagtgagccaagattgcaccactgcactccagcctgggtgatagagtgagccctgtctggaaaaataaacaaaacttcctattttaccacacacagtgcccactcttcttcctttttatattgtacttgccacttccctgccctctctacttttacccagaacacctgtaaatatatgaaacaaactccagtgggtttgccatttttctcctatttttatgataagctttttcaatgtttctttatactttacctcgagttgcgtgcttaatttttattcttttttattttaaaaatatatgagcttactaatttccctctgcatatagttttggccacatcccatgagttttgaaatgtaactttatatcatttatttctttaaaaagtctgcttttaaaatttaaatatcctcttttccttgtgtttttaaccactatactaatgaatttcaaaatcagctgatacatcgtcagaaattgaacagaatccatcttgatagtatcgataaagtttgtcattcgtggtagttttgggaattccaccagcatttatcccgcttctttgggcttaaagatacacttcagaacggcactctaccctgtcatgtgtctaacattagcgtctttgtctttgctttggggcgtttaaacaagaaagcaaactgagccagctgtgtaggcagcacacaaatccgagccgtcgctcttcagtctcctcctctttatcctattgacatatgaggtcaagaccagcgctgggaggctgcattggattttgtgcagatgaggatttctttcatggttacatatttgggaaactaagattaagtacagaagggaaaaaaaaaaccactatgaaacaccaaaaatcatacagacatttagaggatcgctctgagtttgctcacaaactgcagtctgggaatctaaaagaaggagggcaaaagtgccccctgccccaaaaaatttaaaaaaaagtttctcttctttttttaatctgaagtgacaaaagagtaataaggcttatgaggcttgcagcaccatgaaaacaaatcccctcatttgcatccatgaatagcggctgaatttatagctcaagataaatggcaagtcagagagcagccggattaccagtgtccaggcatttgttgaaagcatttacatatgaacagtggaaagaagtgggtacatactacgccccttaccaatccacttaggagactgaaaacccaaagtgaaaagatcctctttgaggctccagcgtgacaaataccagttagattttcagaggctgtgtagcattgaacacacacacatgacagaaagaaaaatagtagttaacagttcctgggtctagccaggttccaggcaagctatgcatgcattgccccatttaaagttcatgaagctcttatgagttagggaattaccatctgtgtagttgagatgaaagagctgggacctcgggaagttaagtgacttgccacatacttctactggctaagccaaagtcattagtgattagaaagcctcacacaagagcctgtgaacgaatgccagacttttcttttcatttatgcttcttacattcctcctctgagctaagcgggccatattccaatccatattttgtagtgtactggaaactggtaaattatacgtataaaactcagggtgattgtggagagaaagcaagttatttgacataattataaagctgtataagtaaatataattccagatgattacatgataagcctaaaataccaagattttatttcttgtattactttttaagatatattcctaatactcagggaatagccagagtaacagagaagcaaaggagagctgcagaacagagtgaaagagccagaggtattcattcagaaggaagggatgaggtcatctttagaagaaaaaaaaaatcaaggcagatatgagttgacaactgtaccaagttctggagttcaggaagaaaggaagtggagagtgacgatttacctgccaacctaccctgccttttaaattttcattctttgactagtcattcaagaagttatctataattcttgttatttgatgttttgagagggaaaaacatataattcatgatttgttctctagacaaatgtaggcagtaatcacttaatttctacaaaggtgagggattaaacaggattatcaactgttaatttctaactgctattaattatcaccctatacagacaaaattgttctctattttgataccaagtcaactgtttaaatatttaatatggatggattcaccacattggcaaaacacagaccagacttaagtctttgtctatcctgtacatgacaactaaaatgaatggtttttagaattgcagtaagagaatacagtatttccggaatgaagtcaaaatcaaatcctctcttctcattaacaagattagtatgtttccagtgtttgaggttcgagggagcctttgacaaacagcatggccctcataaaggcgacattagaaaaacagtgctgaaaagaagtaaacatctcaaatgtcctattttttacaaaacacttggaaaaattgagaatgagccttttatattctactacccaaaacaatcttcattccttgaatttattattgttaacctctcctgcacaaagtcagcatataatagcataagattcccttgattgatgtctccgctggggcctttagaagtctgagacacactccggagcttgcactgggtcaactatgatgttccaggggtcagagaaagatctcttgcatcagccagaaataaagactcccttgcaggtgtcagaaaggtcattcaattttggtgtttatcagacattgtccaatattaagttctactggaaatcaaatctaatagaaaggttcccaaagcaagacactcctgtccctcaactccattttttgttttgttttaatgacgtagtagttttctacagcctttctaaaggctcattctcaatgttgcctcggatgagagccatgttatgatgagtgctgttataacaacttaacatgaatttagcacctgcagataatacccatttattatctcacagttctgcaggttagcagtccagcagacttggctgggggccttgcttagggtctcacaaggcctaaacttaactgtcggccagcctgggcttttatctgaaggctgtgcagaagaatcagcttccaagctcattgttggcagaattcagttccttctcagtctcctactgctccctctatcttcaagccagcaacagcgtactgactcctcacccacagaatctctcaacttccgctctgccatcaaccagagagagctctgcttttcagtgctcctgtgattacattaggcccacttggataatccaggctaatctcccttgggtaaggtcattgattagtaactttaatgacatctgaaaagtccctttttgccatgtagtgtaacatactgacagacatggcaggaataaaagtcacaggggtaaaaatttttgcctatcatatttagtagactggagttgttttccattatttgaattctttaattccagaagactcaaacagaccattttgccttaataatcaattatagattacaatggtctgaatgtttgtctccccaaaattcttatgttaaaatcttaatccccaatgtgatggtattaggaggtggggcctttggaaggtgattaggtcatcagagtggagaccccatgaatggaattagtacacctataaaattagtgcacctacaaaagaggccccagagaaatgcaaattaaaactgcaatgagataccaccttactcttgcaagaatgaccatgttggcagggatgtggtgaaaagggaacactttcacactgctggcagaactgtaaactagtacaaccactatggaaaacagtatggagattccttaaagaactcaaagtagaagtaccattcgatccagtaataccactattggatatctacccaaaggaaaagaggtcattatatgaaaaagatacatgcacatgcatgtttatagcagcacaatttgcaattgcaaaaatgtggaaccagcctaaatgcccaataactgaagagtggataaagaaaatctgatatatatacacaccatagaatactactcagccataaagtggaatgaaataatggtctttgcagcaacttggatggagatggagaccattattctaagtgaagcaactcagggatggaaaaccaaatattgtatgttctcacttataagtggtagctactaagtgagttaccaaatatagtgatatatagctatgaggatgcaaaggcattaaaatggtataatggactttggggacttgggggaaaggatgggagtgggtgagggataaaagaccacatgttgggtagggtatacactgctcaggtggcaagtgcaccaaaatctcagaaatcgtcactaaagaacttatccatgcaaccaaaaaccatctgttcaatagtttttgactattgaaataaaatttaaaatattttttttttaaaaaaaaggccacagttttctcctctctttttccatgtgaaaatactatgaggagacagcagtctgcaacccggaagaggaacctcaccagaattcatgctgataccttgatctcagacttccagcctacagaactgtgagaaataaaatttgtggcttacaggtcacccagtctatggtactttgttatagcagtctgaactaagatataaatcaaaaattaaactgtttgtctgcattttcttgaatgggttcatatttttagttttcaccaccattccaggtaataaacagcatcactcctagtcttgaataactgcctttggttgacaatgtccattctaatttactcttacagaatactgtggtatttcctcttaaatacaatcttccagggcaaggcatggtattccaggtaagaacagttagtttgtaacttttgtaacttcaaataagggggcagggtaacgctttccattttgtttctgtttttcttagatctacttcatttgtcaaccattttgtttctctctctttttttttttttcctgaaacagggtcttgctctgttgcccaggctggagtgcagtggcaacatcttggctcaatgtagccttgacctcccacttcagcctccacagtagctgagactacaggtatgtgccaccacacctggctaacttttttgtctttttgttttttgtttttgtaggggcagggttttgccatgttgcttaggcgggtcttcaattcctgacctcaagtgatctgcctgcctagccttctaaagtgctgggattacaagtgtgagccacaatacctggctaattctttttctgatattaaaccagatgatacaccagaattttcctttatatcttaaatttttttcaattattaacaaagtaatatagccaacatttatgtgcttcttggtatcaatggtaatgaacaatacacattccctaccctctaggttcttattgcctagcacaagaaaacagacagatgtatgacactgtgataggtaactcagagaaggggttactaaccagcattggaatattatagagaacttccaagaggaggtaacatctgaactgaatcctgtaagtctaatctaaagatcaggttgaagcaataggggagaagcagatattccctcaaggcagagggtcctggcacgtgccaaggaaggtgaacacagtgggaaatatggatgggggaagaggctactgagaattgaagctcaagaagaaaataaggaggcattctgtcatgaagggctcctctatgtcatgttagggaatttacacttcatcctgaaggcaatggaacagtggtggtagggaactgaagactttttaaccagagaagaaacagttgcaatctgttttttcattctggatagagtttggagaagggatgctaggtaattagcctaggatccgtgagtcaggagcctaataaaggcatgagatgctaacagtcatctcactgaggcagtggtgacccaagggctggagagaagggatggaattgacaagaagtacaagagaatgggagaggagagagaaagagggttcctagtttctggctacattctgggtatcttatctcatttgatcccccacaaaatcaccccatcaagcaagcagggcaatcacttctatttattagatggcaacaaatggctcagagtagttaggtggcttattctgagtcaataaatgtgagacttgggatcagaaactctgattcctaggttaggggtctttctgttttacatgcagaaattttactcacggctaatagcatcatggaagattccaggctcatcccgaatgtgtaatctaataagatctcaactggacattaaaatgatgagcccacttacaagacagaagctgaaaaggcagcctatcagaggtcaaggttcctataacttttaataaccataacagttcacagaaataaaggggaaggaatgaagtccttacggtagctaagcacttaattactcaacagattaacagagtacctctaggtgcactctgacttggggtcttgagtaataatcaactcgcttaaatagtacctaatacagacaaaaacacacagtgacttgattgtgaacacatttagagaaaatgaggaacaaatgtaatggcaatacaaagaaatagatacaggggaaccctagaaaataatcaaatggacctaaaaatttagaacaaagggtagaaagaccaaatgaaataaaatttcaatgaatattattattttaaaaaattactgccaggatggtggctcacgcctgtaatcccagcactttgggaggccgaggtgggcaaatcactgaggtcaggagttcaagaccagcctgaccaacatggagaaaccccgtctctactaaaaatataaaattagccaggcctgtaatcccagctactcgggaggctgaggcagggtaattgcttgaacctgggaggtggaggttgcggtgagccgagatcacgccactgcactccagcctgggcaagaagagcaaaactccgtctcaaaaaaataaaaaataaatttaaaaaatacacatttaaatgatgatttactaagagaaataatctcatatttctgaaaataatttttttctgtctatgatcaattgcccattcatgggactatgcattggagtgtttttctaaaacattgaaaacccaagagccaggaaagtgcttagataaagggtgtgtttttccttggtgagtaaatccttaatcctttttagtcaagagaagtgtagccacttcagagtgatgcttgagaagggccaacaggcaatgggccattttccagacggtgacctgccacttctaagaccaagaagctacatgggatgcttatcttccttccagtcaccacgaagctgagactcatttgttctgaatgtttaaatttctagaaacacattaacttttctcctcctctatgaccagcttccacatgctacaggccattaatgattgaaactgtttcatcagattttttggttgagttgctacaaaaaatgaaactcagaattaaaaatctttcttgctctgctaattaatagcctgcgtattttcagtcccattgaaagtagtacaatctacttttatattttaagctattctcaaacaagtccatttgttttcatagagagtgatggttaaagtctttttacccaaactagattaaatattaatatttcattcctttaatcagcaattatctactggaattcttctggatcaagttaatgaacttagccctcaaggagcttacaatctagtcgtcaaagcaaaggacccttggtacatgacgaccccacaaaaaaagagggttcaggtcccatagaacgtgcaaatcccactcagtgagttgggttggatcctactctccattttaataatgctatgaaagaaaaggagccctttgaaagggtaaaataccctgtatttaccagcagagcctttttcatagaattcatcacacatcaacctcagcacaacagatatatgcatacaaataaaaactaacctgctccaacatttaagttagttctctaacttctacaggctccctgctgtttatttctaacttaatccctatcaataaagccatggaaatcagttttccaaaattccaacagaaactctatcaaacttggtcaataaagcccaaaggtaaatctctgtggctgcatttagtacacagattgccacttttaatgataaaatgagatggggtggaacgatcctcacttgcattaaggaaaagatggaggggtctcattaaagaccataccttcttggagcatcaaacaagaacacgactcagctgggactgtagttcggcagggaaaccttttccttttcttccagactaaaggtttgatgcagctgcaagttctgtagcttagaaaacagactttctcctcctaggtttatttcaggcctgtgattgatatttcaaaaataaagagaaattgccaagacgagcttttactccgagtgaaatgaagctttaaagcaaaggactggcacgatatcgctggtcttaaaagatctactctggctactgggttgaaagtaggctataaagggaagctattatgataatccaggtgaaattcaggccaagcaggtagcagtttagatggtaagaggtagtcagataatggggaaaaaaattaatatagtcaatagaattttctgccaaattgaatgtaggaataagaaaaaaaagtagttgttggctgggcgcagtggctcacacctataattccagcactatgggagataaaggcgggaggattgcctgagcccaggagttcgagaccagtctcggcaacacagtaaaaccccacctcgacaaaaataaaaaaaattagccaggtatgatggtgcatgtctgtagtcccagctattcaagaagctgaggtgagaagattacttgagcctaagaggtcaaggctgcagtgagccataattgcaccactgcactccagactgggcaacagaacaagaaaaccctgtctcccctccccgacacccccttaccaaaaaaagaagtcataaatgacttcaaggtttttgggataagcaactggaagggtggatttgccacgaaatggggaagtctgcagtgggatagataggggtgggggacaggaattttgatatgttcatgaggtcagttagacatccaggtgaaaatgtggcagctagatattcatatctgcagttcagtacaccaaataccagactgccttactgtaaaacagcaaaagactcatgacattgactaggaattatcgtaaactgagaattttcattgtgtggtgaggatctgctctggcagagagagcctgttctctcacttccctacagggcatccatacagactgatctaattttagacatgacactgagctagttgctggggggccaacgtcaagcaagagacaaaggagggtggctactcacacacagaggttgaaggtagctttccaaaattaaaaagagggcaagggaaaattagagtaaaggaaatctagtcaaacatagtccaaaacagcagtctgggagaaacctgtggtatggcatgtgttaaaggaatctcatttattttgggggctccagtttttccccagctcatagacactttatcttttgcagataacacaccaacaatggatccattctatggtttcacaaaggtgagtgaggactggggagcgactaagacaaactcattttcagccaagtgtgttatcgtaagtcaaataacatacaaataaggatttatgatatttgccataccaaccaacattgactttctgtggcaagcagaaacgacactggatgttttagcattaaaagttctcactggacacggaaaagcagccatctctataggagcagtcttgtaaacccaaacctaaaagtgatggcaaacatcaaactaatgttttgtatttaaatcatgcttacagacatcacaaatttaatcatctgcattcaatcttttcagcatttatagattccgtggttttggagagggacatatgtcatctttttttttttttttttttttttttttttcactttaagctctgggatacatgtgcagaacgtgcaggtttgttacgtaggtatacatgtgccatggtgggttgctgcacctatctacccgtcatctaggttttaagccctgcatgcattagggatttgtcctaatgctctccctcctctttcccccaactccagacatatgtcatcttctgagtatgctacttgttttaaacttccatcgtaatttactgactgacaattcaggtggacagctcttacactccctggcctcttctctctaagatgaaaaataggctgccaattactgacagaagaagaaatacaacgagaagagaaataacccaataattaaggggagctcattcccaattcctcagtacagcagtcaacctaaaataaggacatttccacctatataaggataaaaccatccacccatagatttctctcttcctgatgtggaaagagtttgtaaaaataaaacaattttatgaaaggcaccatcttgagcagttcaaatcttgttttaaatttttatcaagtatttgttctgccaggaaacatttccaaaaaggaaaggttttgtctcaattgctgtggcagcaaacacttccgttggagctgttagagcggtatcaggatactctcactggcttacatagctttcaaaatatttgtgttgctaccacgctcctttgccaatatatgtgacttgtaatacttttttattcatctggatgtatttatacaactgtgtaggtccagaaaactttttaaaagttggcgtaaatatgctgtgatgaaaactgagaaatacatctgcctttctcactatgtagaaatactacatttgcaaattagggtacaaatcagtcttcactttcaaagaccaaattaagcccttagagaggtcaaatttaaataacatcactatatattacagagaaaataccagcatcttatgtaagctttacttaatcctcaatattttattaggcagatccattctcagagctaaggagatctttactcaagggataagatgatatgattaacggatagagttgggatttcttgaatattctttacaaacctgtgttaattatttttgttatttgggtcatgattagcagggaaaccctttacaaagtctctggctttgctttgttcccaaagtcaatcttggagaaagaaccgccaaaagctggcacaagcagtagcacctttacagtgggcaggaaaacaaccagaagtcttggggctgcagagatccaggccggcgagaagtccagagcatcagacaggaagagtttcctgggggtaggaacagtgactggcacatggtaagtgctcatcaacacgcaatgaaataacacaccccaaattctatcaaaatattttggtcagagttgatgaacttcagaggtatttcaaaatgtcgacaaatcttggataccctttgacatataaattagccaccttgggacaatattgatctcttttgcataaaatactgggtattctgttacagcaaaacttttccaggaaaaaagaagggacttgagcttcctttgtcctcttaaaattaggaaagggtctagataaagcaaaagtgcaaatctgtaggagatggctaaggaaggagagatagagtaccaccactgggggctaggtgtgttcatatacttcattttcttttgccatgccatcccacatagctaacaccaaggcattttctgaggcccctttctcatttgctctgtttggaattagaaaagttgctactctcagtgtctggtataacccagtttccccacgtgatcttctaccaagtcaagcatcctctgggcatctgccaggctcgtcagccaggctcctgtggtcctttgccttccctttcctaagagaccacacattaagtcactgttcatcctcccctgaacctgctcccaatgttcgcgccctcgagagagcagaggcgtctgtcccaacttttattctgaaagttccagcaacaatgaaccttgcacagttcactcagtgaaacaaaataatgaagaacatagatggcctcttgtggtcagcaaagccgagattttctcttttgctctcaaatgctgtcttgcaaaatttcacaagtacaaacatatgttatcatctgaccttttgaaaactattctgtgtatatataaattcacttaaagtgtactacaacttgtggctcctaaagctcactttatgctatttatatctttttgttataagaagacattccaaagaaaaagtggtgatgagcactcacatttctgttatcatgcaccccctcccccaagttaaacccacagtcaagtcactcaggccttttgtttcaatggatctcagggttaaccacattttgacagtaacaacaacaaaaaaagttctaaatgtaatctaagttaacaaagactgataaatgtcacataatcaccagatagaagatgaacactgctgacattaaatcaaatagtttgtcattctgttggctgtcaaattaggatctcttaattttaaatgcaattgctacatacgattttataaaataattaatgttcctaatttaagactacccatcttccaccccgcatccccaataccatatcctgccaaactgtttaatcatgcaaaatctattaattgcttaaagaccctcaggttgttttcagcagtattttcttctgatgtttaacacagaaaaatacatacccctgcatacatctgtacctggttaatggtggtgacatgatgtcctgcctttatcacacgggtccatctgccttgcctattaactatcaccttttctaatgcatgtgtagactactgatcacatccttgtaactagaaggagttcaatatggcttaggtgtaatactgctcccccaatgagccatcacagaggaggacagctaaggtgaggtagggggcctaaaaaagacaaacatgaaaatcagcaaataaaggaaaccagaataggtagaaatggaacaggagatattaaaatgaagagtttaactgaaatcttagctaatgctttcagtaattcaagtcatttgattcagttccacaaaattacccagagcatgaatccttgcacagagcatgctccagaaacaagcagaccccaagttctcctcgttttaggcggcaaaactctgttaactgctctttcagtccatagggtagcatctcaatttatagtattacacaacctatttagcatggtaatctggcttctactgcaacagatttaagaaacagattttgactactcatggaaggaaaaaaagagaactaaaaagcatgataacgttttcaagggaaagacaaaagaaataaagggctagccagctttgtttcatttattaaattccaagggctttccccaccagtttgaaaaatgcatgttattaccactgtgtttattaaaagtgctactttaaattgcagattgagcaagtgggaattccctttggtagctgtagattacccactaacaattatatgcaattttaaatgaaaggaggaggaaagaaccaggaagaattgtagaacaatggttctaaaagccactgataatttatataaaaccagacatctaaatgtatgatagtaaaatgtccagagtcacacagatgcaatattcccagggttgctttgcattttgatttttaaaagtctttcaaaatggtgctcagaatcaactagcataaactttgctcactgattatctgatagcttattaccagatttaagaaggggctagggaccttccagagcaaatggttgcttactagctcacttgaaaaatgcacttgtttcagcacagaaataacaaatctgtttctgattcctaacattattttccaaatgctgccaagaaaagaatctaaggaattcttttacatacacaacatacaaaagacaactggaaagaggcctgtgatctgttccagggtgcacgatgacgaaggatagagttagtttctaatatgaactgcccttgtgggagcagaggcacatgcctgagattgttcatagctgtaatctccaacataactctttgctattattagacaacttaaaggccttcctaaatcagtaacttgtgaagcagaagagtataggaccctatcgttcggggcatgcaggcagctgggacacacccaattccacagaattcaccacttttctgctccatgaaactagatttctacctcttggaagacacataaaggctgaggaagggaaagaacctgtctaacacaaaccaggttaaaagtccctagagagaatgcgaaaccaggtaaaatccattagtaaattcaggaacttgaggtctgtgatgcttataaaatatagtgaaattattcctggggcacagaaggatatatgtatgcatcctgtccatattaaaagcaacatcaggccaggcgtggtggctcacgcctgtgatcccaacactttgggaggctgaggcggcgaattacttgaggtcaggaggtcgagatcagcctggccaacatggtgaaacctcatctctaataaaaatacaaaaattagccggacaaggtggtgtatgcctgtagtcccagctactccggaggctcaggcaagagaatcacttgaacccaggaggcggaggttgcagtgagccaagatcgcactactgcactccagcctgggcaacagagcgagactctgtctcaaaaaaaataagaataaaagcaacatcatttaaaaaatattacctcgtttttaaaactcaacagcagagagtctgctttaaaattttcaacattgtgtaacaatcacaccaatgatttcaaaagtacatattttagcatggtttacttctgttatactaataagggggacttagcaacagagtcccctttgaagagaaggaggataagcaggagaatgttgaaagactgagtcatccaacagactgagctatctaatgcaactgtttaaatttttggctcacactgagttgactgcagtgaactaagttcaattttgttttttgtttttccccttctcagcgggataaaagttcatgaaagaagccgaatcgattaaaggaaataaaaaggcaacattttcctttgcatgactgatcataatgggtatgtacattttcaactcttctacctacacatacaaactcatcttaaatttgcattgccatagtttcaaaggcatcctcaaagcagctatgttggatatcattcttacagttttccattaaacacacttcccatgcagctgccctcaggctatgtgattttacatgcggtccactgaattgggttgaatagcgtcctcccaaaatcatgtccgctcacaaccctggaatatgaccttatttggaaatatggtctttgcagatgtaattagttaaggtgaagtgatatactggattaagggtggaccctaagtccaataagtggtgtccttttaagaaaaacatctgacacagagacacagagaaacacacaggaaggaaggcggtaggaagaggggcagaaactcaagtgatgctaccgaaagccaagaaatgcctggagccatcaggaagtggaagaggcaaggaagagtctttcctggagccttcagagggagcacggccctgccaactccttgatttcagacttctagcctctagaactgtgagagaatacatttctggataagccactcactaagcagtaatttgttatgacagctctgggaaactaatgcagatttgtctactaaccagtgccagtaggacaatacttcactaccagtccacaattagattagtacaggaaatgagattaaatgtttaagaacttttatagctgtttgacaatgtggtgatatcacacaagcacatgattttgtgttttacaaaacatcagtctgtaatggtttggaaatttcttttaaaaagtcttcaccgaagttagagaagcactgcaaagataattagtatttataaagttaaagctgatgtaccataattaagaaatctacattcagaactatttcagagaagtgtaattatgttccacgtagctttagtagtaaaaacattttattctaatttttatttattctttaaacatttttttcgagacagggtctcactctattgcccaggctagagtgcaggggcacaatcatgactcactgtagcctcgaactcctagcctcaagcaatcctcctgcctcagcctcccaagtagctgggactacagttccatatcaccacatctggctaactttttaattttttgtggagacaaggtctccctatgttagccaggctggtcccgaactcagggcctcaagtgatcctctctccgcggccttctaaagcattcggattataggcttgagacatggcacctggcctattctacgtcttagaataatctgtgaatggtacacatggtagtttgctattaatcatattattcgctattaatcatattatttgattagccataattcacttcccagaccataatggatcacttgctacacagtgaaggaacgtaccatgcctttgttagccacagagaccttagctgaacttcgcagaacatcttcacaaagactgagtgctcaaatgttgcacatacaaaatgcagttgggagaagctgatgtatctgagatacttcaatagcaaagagtgattgtaactatataagttacgatagtgacaataatgagaaagatggcatccttcttcaaggaaggccaaattgacaaaaagctgagcagacctggcttcagaaaagaaacagtctaagtagagaaaaggaaatcctgcatcaatgtgggaagcgatctgatttaaatattttctttcagcaattacaagaaacacacaggaacatgatttaaaccaaaggaagagcaatcatgtttcctttaaaatcaatgctaatcacaaccacatatgcaatagcccctaggaccttggctagccacagaccaatgaatgaaagccacttttccaaagtaagaacacaaagcatcaacaagtagctcttactattcttctgcttaatctcactcacccttattttatcatgggcttgcttcatatgtagggcaaaggacaacttaaaaatcattattgtaaatcaacaagctataagtcacaggaagaaagtagaatgtcaactgtttgtcctagctgccgggagatcagagagtaggctttaaaagggtgcgattgtggattcctgattagaacacacacttcagcgtaaaagcacttagttgtcatcacatgccatacgtttgagtttttaaaattttctgagttaccacagaaactaagagtccaagaaaatgagagattctttaataaaatgaaatggctgttatgggaataggtggagaaaaatatgttgaagctgcagatgtcctacccagtaacaattccacaaccgtattcaattaaaaattgtaaaccttaagctatcattggattgtaatgatttcaactgcactgtggaaattacactaggtagcatgtaccttcatccaataataccactgactcttcatacctaaacattttgtagaacaatttttggaagaaacagtgtcatgagagctcataatgcctttcatctaaaattatttttcagaaatacttaaattcatgtcagcccatgactccttggaaatccactgcaactagatactctctgtagtaagaattaattgaatgcttgaggacagaaaaatgtgatgttcctttttgttcttaccccttcaatttcaccaaatttgcacctactatataaaggaatatcccaaacaccaagttcaatattaaagactggtaggttttaagatgtcaaaataaggttaaaattgcaaagcctgggtctacagaatccacgtctatacctcatgaacagactttgaggacaaaggagcaatccacaaagcaaataagccaggaccactttatttccaaaacttgaaaagatgtcaagaatttcccatcaacagaatgacatacactgaaagatatgaacagaacagttccaaggaaattcatctccccctctacccccaccatttcaacaatcacatagacaaacacactctcacatgcctacattaattacattgtaataagagttggaagaaaaatagagttgacggaaaaaataaatgcctaaagagagaaaatactccttgactaatcagggaatgacgacatatactcatataatcaccatcttatagtacttaggaagtattataatccatatgtggccagaacaagaagtatgttctttcttttcttttttttttttttttttttttttgagaccgagtttcactcttgttgcccaggctggagtgcagtggcgcgatctcggctcactgcaacatccaactcctgggttcaagcaattcttctgactcagcctcccaagtcgctgggattacaggcacccgccaccacgcccagcctagaagtatgttctatagtcaaattaatttcactcctaagttcacagagtaaagcttaaagcaatagaatcctttaccctttctactccttctaacccttacatgaacaactccttacatgaaaatttctctactactgctgtaaactattcctatatttattgagttgattttaaaaaccttcttttaaacttttagctacttttgtctataacaaaacacacacaaaacacattcaaacacagaaatatcctttctgtctagaagagaattccatctccccagcaggaggtctttcttcctgtttgcaacaaaaaagaacaatgactttttcactttcatacttacaaaactccctcaaactttgatttttactggaatcagctctgtgatttagactctgatgctaaatgacaatcttccccaagtagaactttgccacccaaatggacacgaagtcccctcacctttcagacagaacattctgcagcagttccatggaggggctgtgctctgtggtctgatgaagcctgcagtgctaggcacagctgtctcccagcccacctcctcagcgctcactgccagagagcggggcggccagccagcgcctgttactccaggaagccactgcccaatccccagcctgctgggctgtgctgctgacacctccctatctctcctgggttatttcacaccatggaatcagcctgcaatcatcttgaaaggggaaaggagccaggggttagcagtcaccgttcatatagtccagtgcagatcagcccaagggcgagcccatttgtttgtgcttctctctcagcattttccaccacagcggatgcagctcttcacgtgatcaacaacacaaaaaagaaatcactcaattcagtttaaccttttgctattaattatgacttactattcactgacttcattattccttttctgttcacatgctccccttttttttctaatatagaacacaccatatactggtacataattaacactgcacattataataggaaactttgcactctgttgtctgagtctacgtaaatgagtgaatatatgtgaaatgctctttcagtcccagacaaatcataagcacaaagtaagtgctatcattactactacatactgctatttaaaaacggggcggacatggtggctcacacctataatcccagaactttgggagaccaaggtgggaatatcacttgagcccaggagtttgagaccagcctcggcaacacagtgagaccccatctctacaaaaaaaaaaaaaaaaaaaaaaaaaaaaaaaactagctgggcatggtggcatgcacctgtggtcccagctacttgggaggctgaggagggaggattgtttgagaccaagaggtcgagactgcattgggccatgatcacaccactgcactccagcccaggcaacagagtgagaccttgtctcaaaacaaaaaacaaacaaacagaaaacaagaaaaccacttgagtattaggataaaaatgtgaagcatgttacacttctatggcaatgtcattttttcaaatgaggaaacaaatgcagcattagagtacgagaatttctaactgtactgtggctgtgatcagatcagtacatttcttcccctccactggaaagctaaattcactctggcaagttcaaggttacttgactgtggactctcaaacacaggtggaaagtggcagaaggaatcttatgacagacctgatgagaaacagtccacaaatactgcctcaggagcaccctgcttgaaaagtaccatctgaaccctaagtggccccgtggtccttccccacagagacgtgagtctcctggctcaggaagtggccattgttcacaggacccgttgctgtttgcaggtcttccttttgactccacaggatgcaggaaactgactcacagaaccaatctatctatctgtctgtgtcctggggtgctcactgccacacagtaaggatgctctatgttcttttggttttcaacatacggtgcagcatatcccagctgggtttctgctccctgtcaccatgaatcaccaatagcacctgggtaataaatatgttgtctaccataaggaagtcactgtactagtttctatgatcacaagaatatataagaggtctctagccagaagctagttaggattaaaaaaaaaaaaaactgcatggggaatgatgaacagtgatattaacgcttcttcttctttttttttcccctgagagggtctcactctgttgcccaggctggagggcagtggtgtgatctcagctcactgcaagctccgtctcccaggttctcgccattctcctgcctcagccttccgagtagctgggattacaggcgcccgccgccaggcccggctaatgtttttttgtatttttagcagagacagggtttcactattttagccaggatggtctcgatctcctgaccttgtgatccacccgcctcggcctcccaaagttctgggattacaggcgtgagccaccatccccggcctgatattaactcttagaacagaatgggagggaacctcatagctcatttcatttgtgtaaaccatgaggtgattgattcacctaacaaacaagatcaaaaccagaccagctgattagcctcttccatctcaccacgggactctctccatggctgatctgagttattctctgtcctctcctgttctgagtagtctctcccatgtaatttacgaattacagaggtattcctgaaaatattttcatgggttacatttaacttttcaaattgtacagagagagaaaggaactcctaccttagagacttaagacttttgaacacaggctaatgagaccgagtctcactctggctggagtgcagtggcacgatcttggctcactgcaacccccacctcctgagttcaagcaattcgctgcctcagcctcccaagtagctgggactacaggtgcccgccaccatgcccggctaatttttttttgtatttgtagtacagacagggtttcaccatcttggccaggctggtcttgaactcctgacctcgtgatccacccacctcagcctcccaaaatgctgggattacaggcgtgagccactgcacctggcagtttaagcctttttaaacagagatgactttatatgctggaaagtatagtggactgaaaagtaaagagaatctcattccagtcatatctatatgactatctagttcaagtctgtccaacctgtggcccacatgcagcccaggacagctctgaatgtgacccaacacaaatttgtaaactttctgaaacattatgagattgttttgcaatttttaagttcatcagctatcattacggttggtgtattttatgtgtggcccaagacaatccttctccttccaatgtggccccagggaagccaaaagattggatgccctaatagttagtctcacagcagttcatggcctgtaaatgtgaggactgaatagaacaaggggactaaattaactctaaggttccatcttaactcaataattttttatttttggtatgaatacacacacatactattaggtacattatgtcaggtcacaggaaaagaatctttgccttcttgtggtttagtgcaagagatgagtggaataaatataattcagtgtggtaagtcacataacagaagaatacacaaaattaataatgatcaatggtagttcttgcctactgccatctcattaagctactctcctaaagttaaagcatatataatttaatgtagtgggttgaatagtgtccaccccaaattcatgtccaccctcagagtgtgaacttatttggaaataaagtcttcataagttaaggaaggtaagaatcaagatgagatgatactgcattaaggtgggccctaaatccactcacagtgtcctaataagagagaaaatggagtcgggcatggtggctcatgcctgtaatcccagcgctttaggaggccaaggcgggtggatcacctgaggtcaggagttcgagaccagcctaaccaacatggagaaaccctgtctctactaaaaacacaaaattagccaggcgtagtggcgcatgcctgtaatcccagctacatgggaggctgaggcaggagaattgcttgaacctgggaggcggaggttgcagtgagccaagattgcgccattgaactccaacctgggcaacaagagcaaacctctgtctcaaaaaaagagagagagacagaaaaggatacagagacacagtgaaggtcataaaagatggaggcacagactggagggatgctgtcacagataaggaacacctggaaccagcagaagctggaagaggcaggacagaattctcccatactgcctctggtgggagcaggactctgttaccaccttgattttagaactcgggtttcctaaatagggagagaataaactggttattttaagccaccacgcttggggtaatttgttacagtgactctagggaacttatacatttagcaaggtaataattacgtgagatgggcatgatttgtttttcttttaaatcgtcttcaatttatgtttacataggcttaaaacctattttttccatacccttgtacttactgcagcaaaatgttatagcacttctaaacagcacacataccaacctctattaaattgctgaaattataggtatcactatctgaaaacttcacagcattaacctcgagcaatgacaacaaaaggggtttttcttaatgtcaaatataaagttatcatattaaaaaaaaatcccttgtgggccgggcacagtggctcatgcctataatcccagcactttaggaggacaaggcaggctgatcacctgaggtaaggagtttaagaccagcctggccaacatggcgaaaccccatctctactaaaaatataaaatgagccaggtgtggtgtcgtacacctgtaatcccagctactccggaagctgaggcaggagaattgcttgaacctgggaggcggaggttgcagtgagctgggatcgtgccactgtattccagcctgggcaacagagtgagactctatctccaaaaaaaaaataataaaataattttaaaaagcccttgtgtttacaactgtatgtctgagaataaaacatgaaaaggcacactgttcaaactaggaaaaaataagaactatccattgaaattatgattgtctgacaccattgatcattgctactgagactgaaaaataaatacctaggaagctttgtgaaagggagtaggtccaagatgatgcacactcacaggatttgtagtcctctggacagcacaaaggtctggcctttgccaaccatgaccttagggcggcaaccacttctctcccttgtaggattacaacatccagcatcatgttaaagtttaacattattatctctacaagagggagtggtatccacacatgcagccaaaaatatttagataattatgtcttcaaaaccactccagtgtgatttcacttgtgtgctaccagtttaattttgatttccataaaatagtggggatgagaataaattagaaattagtttgcataatacacagaattagtgcgtctagatcagctcaaaatttgacttcattcctggcaaaacacaaaacaaaattatacaagcaaaacaggcaaaccatatctcctccctatgtatcctcttactcttgccaaaaagcccagataaagatggaaaaatccttctccatacccattcacaagtctgtttcacctcagctgcaaagtacagtacagtagtcctctcttatccgaggttttgctttcagtactttcagttacccctggtcaactgaggtccaaaaatattaaaacagagagagatatcaagacagagggaaagagaccacatttatattaattttattacagcatactgttataatttttctattttgttatagttatgttgttaatctcttactgtgcctaattcataaactatcataggtatggatgtataagaaaaatatagtatatatagggtttggtactatgtgtggtttaaggcatccactgggtgatcttcgaacgtatcccccaaggataaggtggggctactgtattcagacaggcaatgcttattttcatagccatatctctagacatgcttttaaagcatgagaagcttgtgaagttggaggagactgaagacatatttcccatcacagtgctttccatttccccctggatgcaagagattggagatgctgaaaccctctgacacttttaagatgacaatgaccaggttaagccaattccctagagaagaatccactctggtggcacctatgaccatgactaacacattttacccaagttttaatcattctccactcccctactattctacaatacttctagtttcaccagtattctgaatctctcagacaagagatttaatctgggtttttctatatatttattactacctcaggcacaacagaaagaagaaaaaaattatagcattataactttaaactggctaatttcactgtctccctggctcaccagggaaactgatttaaaaccagtctccattttagtgccttcagtccatccagctctgtaggcaggggaatatggaacgcgggtttttgctctggacactgcctctcaccaacatcatccgagcctgtatcctgtttgagtttactccactccagagccaggcctgacctactgagtcccaagggcaaccttcatcctctttgcattttcttttaggaaacagctgaatcctggggtattttgtgctggactcaaactaaccatggagcagtaaggcaactacacaaatgcttcatggaggctcttcaatggcctctggccttgggtagacacattcacatcactgtatttcctccctgaatcatgggagctctgctctaattcgccatttaaaaatataccctcctggggccgggcatggtggctcatgcctgtaatcccagcactttgggaggccgaggcaggcggatcacgaggtcaggagatcaagacaatcctggccaacatggtgaaacctcgtctctactcaaaatacaaaaattagctgggcatagtggtgcacgcctctaagtctcagctactcaagaggctgaggcaggggaatcgcttgaacccgggaggtggaggttgcagtgagctgagatcatgccactgcactccagcctgggggacaaagtgaggctccatcccccaggagatatatagatatctatatacaccctcctgagccagttcttgaggttatttcaacttttttttccttcatagccaagcctaggtctcttgacatcagtcaagaaagtagccctcatttggctccttttcatgaaatttgtgccttcactcatggcaccctagctggctctcctaacactcaaagtgttagatttttctctttttttgtaagaacctttaggtccttctggtttcatcttcccagggaaggtaaagatgagtttccaagttgacctgggctcttggcttagataaccttccagcctctttcggttgcccttagctgtggcaagctgccttgacttccactgctgtccactgagctccagtctgtaactccactcatttcctcagaagcacagtgacacctcatgagcaacagtgcagaaaggagattttattatggaaccttgtgccatttatccagccctgatgtcgcttcaaagcatagtgcctatggctgagatgtttctttgagacagagtactccttggtacctttgtagttgatattttttctttcgaaatctgaccttttaatccaccttcacacctattacatctttccaaaagaactccaattgcaccatcctttccctccagaggaaaaaaaaaatcacgtttctacttatgtaaaaaacacaagataaggataaatcctaaattcctcatgtagcaaataaaggcctgtctggacttgtactcagtatttttttccaaactattctggatgtatcccattaagtgacccccttggtaagctctgcgtcatattccatagggtcttgtacctctattgtcttgaatcaggctattgcctcctttgtctggaatgcagcccttacccccatactctgctttttacttctctaaagcctcatctaaccatgctcctctccagtagcaggatcaatctcaagcttgcaccatgtcccatggcacttcattcacgtggctggcatggtattacaattctgcccacccaacgtgagtgatccttaaagcagcaacttgctcattcacacttaacttctggtacttttcagggtgctggaacatgataggtgatccatgtttgttgcacagatatgtaaagcagaattattattactttgctatttcatccaaaagcaaatcattagtggaaagtatataaaacctagataagacacataaccaccagcatagattcctatgaaaagtcatattttccttacaattaaatagatgtattttccctacacatgacggtattaaaactcattattaaatgaaaagtcagtgatcatttatagttaaactttatggtgaaatctttataaactatcatttccttaaaggattaataatctgaaagagtctcatttacaaacacacaaacacagataccattctctctccaggcaacttcaccacaacaaactcagaaagcagtttttcctactctcattctgcctgaattaaatatttgaaggatgatggaagtgaaaaaggaagaaaaatattttctggaaatatctcttacaaaagaattaacaccagtatgtccagatggagggaggataccgaaagatgtcataataatgtccccaaattccctttcttagtaaacttataaggaactgtattataggagagaaaaacaaaaccactggagtctaaattgttttctctttgccattgccactatgcctaacatatgtgtattatatttcagagggtttaggttaaagcacataaaaataacctcataggaaagatacaacagtaggtcctttcacgttgtgtatttcttcaacgtgctccctgataaactgacttgcaatgtatacagatcaacgggaccctccacccaccaaaaaaagtcatttgtgtcattttctcctaagcatctgagtaatctgaggaagtaaaaaccataaccaaccttcaactacagaaacaggtgcaacttctccacccacaaaatcaagaattattcaagttcatgtaccaatcaaccaggcggaccacagttctgccacaatatatgtgttaataaaacataaccagagagcgtaactggactataattacttttaatcatcaaacaaaaagataaaattccagaagacatactaagatattaagagcaaggtacgccaaggtaaatgtccaggcttctggtaacttctgcatagataattgaatacattattctaatatttaatttctttaaggcctacttgtttaaaatattgtgttttgaaaccaactaagtatttgaaaaactcaaagctctgtaaagaactatggaatttctataaaaaggtagtttacttctgaaattcaccacattcaccaacttttgtccccctttaaccttagtgacaacgtttcaaggaagaagctaataatttccctttcaactgccaaggcttctgagtcgtgaggcagtttgaaacttcaggaatagtgagttacttcaggacccataggatttacaacaataatggtttgaggaaaccacagcatttaggctccttcagtctttttccctgtctttaagagtttaaaaataagcaagaaaatgattcttcaaatcggcagaccatcttcaggggtggagtcttgccacggtgcataataatcccagagttacaagatccacagagcacggtgcggcccacaaaaacagctcttctgaccctcctcttgatcatgccgaacatgatctgagccttttcctttttgatttttgttttacctctctctttctctttctctctagcttaaagtcagtaaagttctagtagaagtaacttaccattttgttcatggtaatggctgggatttcctttgcgttctatttctatttaatgcatctttgtaaactcagctattaactataataagtctacagccactcaagagggaaaaagttccaagtcaaaaatagaatgctaagtttaaagttttaaaatgcttctattgctttcgaggcaggtgtgcttctgacagctctattaagttactcaactgtctctagggacttcagttcctaacaaagaaaggctgcagcctggtgcccttgggttggttttttgtttttgttttctttttcctctttcattctttgaaaactgaatgaattctgttcttgtgcggaataaaagtgacatgagaaagcctgttttcaggactggcgttcttcctcttttgtctttgctatggtaagttgcttatcttctgcatatctgcttagaaaactttctgtgtgatacagagtgactcagacgcttccaaaacctgctctgtaaggtcagaaaaggaatttgtcacttgaccctcacagggcagtcaggaatgtcaaaattaaagagactaacagaaaggaacacactctcaataccttaagaggggacaaaggaatgtaaggacatagcctcactgggccctgttgggtacaggccttgagcaagctaactcacttttctgcatcctcccttcttagctgccaaacaagggatcagacagggtatctcggaggttccttccagccctgacacgttagttagccttgttgttaagctaactctacttggatcccttcacatgtccaatttaaagactgtgtacatatatttactaaaatgcttcaaatggcaccgagagaagaaaatgtgtggtcattgcttcaataagagctctctctaaataattactaaagttgatttctctcattaggtaaacacaaaagtcagaattctttgagttttcatttcattagaaaagaaagacatctttaaaactatcatcatctctgatattttacaaccaaaatagagagtaactatgtaaagtaccaaaagcttttcctatcaggagtgagactcttctgtcaattcttcaatgtttagagaatgacagaaggaataacaatgcttctgtcattgttattgtcattgtcattgtagaaaaataactatttttcttttctctgagccccatttcttgagtcacagaattttctgtaatctctattttcaattaattcaggttgcatttaaacatttttgtaggtctcctatgtgcaaatcaaaatactcattgagcaaacactgtggatctaggatgcaaaatggggattatagcatttcaacacaaactagtaaaaagtcatgtgaattctctgcactgggatattagtggttcattaacaaattcatggaaaaccagagggtcagatcagctttttcagccacattttatatcattcccattcgcattaatgaggctcaaatatcgtttaaagtatttggccaaaaatgtttagtagagtagaagtggttttaaataattgaaatacgtcttaccttcactatttcttgactttttaaatatagaggatacaaacaagaacatgaaatagaaatctgggggatgcaatttcaaccaaatgaaaaatgagtaaataaacttggtgtctacatatcagatggagaaaagagagtgacaatcaacaagtaattagagaaagtggttaatggtgaaatcaaggtttaaaagcatacttgcttagtaagtgaaacaaagcagtagatgataatcctccttgaaaactcggagtgatttttacaggagtgattaaaatgtaatgtttacagaaaacactgggatggccaaatacagtcaccggtccatgatgttaacacaaacatgtactttattccaccgtaccaaaacgaaaagccaacagaagataaacatgtaaaaaacatagttacatattagagtaacatccacttatcaacggatcattttgctgacaaattcaaccactcaaaatatggcaaagaagaaatcaaaatggcctcccaccagacagcactgcccacaggattgtggctcgggatctcatgcatcttccagtcaatactgttgcaatacactgggttacccagacccccccacacaaggtaacacaggagcaacaccaagccaaagagtggtggggactaccagagacaggtgcaagtacactgtcgaaagagaaaggcttccagcaaaagtgaaatacaaaacagtcactggaagttaaagaacactgcagagatccatttcatgccaaagcaaagatctctacaatattcagcggccatcagggcatcaccaggtccaatgactagtcacagtgacaccagggcattaaaacgaggttaaattgtactctttgattgagcagagttgttgaagtgtcatgaagagtgtgggactaagtcacgagaagtggattcaaatccagtctataccaattatctctatggcttcaggcaagtcttaatattgcaggaactgcttgctcacaacaaaaaggggcaatgccacctgtcctgccactcccacagaactatccttacgatgaaaaaagaccatgcatgactactgcacaaaccatgacctgtaaacaggctctgggtgtagactatactttagaaagatgttcattaaaaaatattttcaattgttttagaattctgaaagatgaacgaggcaagcttctgttatatggaactacaaataagtaaaaggcatacttctctagtattttatacaagttaatatctagtctatatgatcacaatttagaaaagtatctctaaccaattaccagggttttttggggggctttttttttgagatggagtcttgttctgttgcccaggctggagtgcagtggtgcggactcggctgactgcaacctccgcctcctggattcaagcaattctcctgcctcagcctcccgagtagctgggactacaggcacccaccaccacgcccggctaattttttgtatttttagtagagatgtggtttcaccgtgttagccaggatggtttcgatctcctgacctcgtgatccacctgcgtcagcctcccaaagtgctgggattacaggggtaagccactgtgcccacccttttttttttttttttccctgagacagagtctcactctgtcgcccaggctggagtgcagtggcacaatctcagctcactgtagcctccgcctcctgggctcaagcaattctcctccctcagcctcctgagtagctgggactacaggagcacaccaccatgcccagctaatttttgtatgtttagtagagacagggtttcaccatgttcaggacggtcttgatctcctgacctcgtgatccacctgcctcggcttcccaaagtgctgggattacaggcacgagctacagtgcctggccccagttaccagtttttacagtaactgtttcaaaaaaaacactacagccaggcagtggctcacgcctatattcccagcactttgggaggctgaagtgggaaaatcacttgaggctaagagtgaagaccagcctgggcaacatagcaagaccccttctctacaaaaaaacaaaataaaataaattagccaggcatggcggcaggcccctgtagtcccagctaacttgggaggctgaggcaggagaattccttaagccctagagttcaggttacaataacctatgagtgcaccactgcactccagcctggacgacagagggagactctatctctttaaaaagaaaaaaaaaaaaagaaaaccaccaaaacattgcttttgttttccagttccaacataggatctctgctacatacaggctagaatccaaaaattggaagttaaagttttggactaaacttcacaactaattttcccctatgggggatggacagtaggctggtaaataaagacagagaaatctacaggatcagggcagaaactggccagacattgctattcatgggctttccctagggccagtgagcaggtgcagggaatcagcctgagtgcatcagcaggctcttccacactgccctgcagcaggcagcaaggctcctgttggcaatcactcggtcctgctgccaactttcaaggcttatacaccaacggggtcctggactaggggcgcagaggggaactcagaaaaggacttcctatggtggatgaatgcgtaggtggctcagagtcacaagctgggttttggaccagatggttttctgagaggcaccactactctacactgtttctcaaagtactcctggtataccaggcctttctccaacaccaagacaacagtggactatctacagaaattccatcatagcttgtaacttctacatattgagaaaaaaaagctatgtgatacacatgcataataacaccctactgaaaaaagtgaagtctaccgaaagcaccatttttgagggtcataaaatcaagtagtaagtcaggactgacattttctgtttgataacatagaatagaataaacagagaaaacagagtaccatatgtagacacgcagtaaaggtaaatcattccacaaagctattccatgtacgcatgccatgcatatatgccatgtgtggcatgggaaccaatgtaaagtgtatttattactttggacacaaacaaaactttttaaactctctgacttaaaaaataaactataattaaacttttcaggccctgaaaaccccaaaacattcacaccatagttcctgtaggagattatttcccccatttgaaacaagcatggattctagagaaaactagctcaactttctcagaaactagagaagaatttactaattggatttttgttcaaacctttattattagttggagttggaacataaccttcgagatttctaaagtcagtggcataaccttcccctggttacagtgacataagaacacagatcaactgaataaaccaacacattctccagagtggcgatgtaaccaaggtctgctgatccaaagcaatgtcgaaagacagaaaccccaacctcgccagcttcataaagcatcaatagcacacaaatgagacacggtggcttaaaagtggcttgcaaatggaacagagctaagatccttatgacagaacaacactcaggcatgcacacgtaaggacaaagagttggacttgggaagctagcaaggaaaaaatatttgaaacatctttttataatgggaatagagtgtgttgaagaactcagcaatgaaatgactttacggtagaaatcaaagttctttttccaggaagtcagagcattctatgtactttctactggtgaaaaacttatgtaaataaataactaccaggcaagatgatcacagcaaccaaactaagcaccagccacaaccacccacaaggtaaattcacaaattgccttgtgtctgctttgtaaaagaatccccgaccaatcaagactaaagcaatacccacccgtattcaggaaggaatgctggtttatctcagaaggcaatccagaaacaccagatacccagtttctgctttagctgaggcgtttctagttacaaagttaaagagaagcttagggaatagaggcaagggaactgtatcgacaataaaatatacttattctcatgttctctagtcaagtttatggaaaagacaaaactcaagtgatactgtttaaagaaatctcaactgcttgtggcttttattaatacttgcgagttttccttcgagaaagccaaacatatattaagcccaagcctgacaatttactgtaccactaaaattattttaaccagtgaatagattagcctttattcttgttctatacctttttcaataatgcacaaaaacttattaagctatgtcttaaaacataaaaacaaacctacaatactacaagtgtacaattagcgatgcaagcagcatattcagaaatttgaccaagctcccacaaaccacaattacttaggggatgggaatccaaaaagtcttagctaagcggtggcgggtgcggggcatggaaccggatcagtatgggagtgatgatctcttctttccttatagcttattccctcctcttccctccaggttactgccaccttcttccattcactaccattcccaatacagtctttttcaaaaataagagggcatgaaaatggaaaagtagagtccctcttcattccactaatcctaatgagctcccactctaggaaacgccctgtaggccaggttgctcccagtaacttcacaattcaagccattttcacattgactttgggaaagggtctctcctcagtgtgagttactcagaaggttgctttatatcaagtgtatgcagcactaggggctctccaaacacaagaacccacgatgtgcccgccacatgaggcacacgcccaagcatgcactcaaacactagaaattagcccagcaaatgatggtattggtaggggaagcactagctgggagacttggccaacaaatcctccccctacaaccactgggggaagatggtctcagacaactgcttgcctaggcaagcattcaccatttctcttacagcctaaatatccaaagcaagatgcagccagcacagtaacgaattttagcaaaaactaagtaaataaatgttagtttaatgtctatgatatctactagtcagtcatcaaatgtcagcgatgaactgatagagaatgctcagagatgctgaattcaacggaacagagaagaggtgtggtacaggctgaagaggggcagaccacagctagaccactgcaaccagcttcaggcatccccagcctcacaccacacacatttgtgtatatgaacagtgtgtatgttgattacacataaattttccaatcacatttattaaaacagtgattgccataaatataatctttaattagggagattagaaatataaggtaaagactacccatagttcacaacgctagaaaaagtataactatacattggaaaaaatcacagatgccgttgctaagggaaaaagtaattatgaaaatctgtgacttctcttaataaagataccctaacatggccaggtgtgatcgctcatgcctgtaatcccagcactttgggaggctgaggcgggtggatcacctgaggtcaggagtttgagaccagcctggccaacatggtgaaacgccatctctactacaaatacaacaaccaccacaacaaaaactagccaggcgtggtggcacacacctgtaatcccagctactggggaggtggaggcacgagaatcgtttgaaccctggaggtggagattgcagtgagccgagatcacaccagtccactccagtctggggcacagagtaagactctgtctcacacacaaaaaaatatatagcctaacatgaaaatctgtggtttcattactacttttcctcatgtgcctatataatcccttcaacgagaactttgtcttttctcggttacgacagcccctagatgacctggttctaacccctaatgctccaatcccttctgcacgccataaccagagcaggttccttccaatacggcttcgaccgagtattcacaatagatatttacttactatctgcaaagtgcaaagcacttgaaaaaggctagacttcaaagggcttcaagtctaggagaagtatgaagtgcatactcaaatattctcaaagcagagtatttgcccttaaaccaaaagttattaagtccttgatgccaaaacgccctaggtgctttcaatgtcatttctccatctgaagaattatactcagttccctgcttccccacatctgtttctctgcccagttttcagttctctctaatgatctgacccttccttaccaaaccaactattgtttttattggtcacttatgatatccagactatgtttattaaatgaatgaactcatgtaaagttttaataatagtgtctcgccacggtaaacattcactaaatattagctattgttaagcttatggataggtcgactgattcagacatgactttcaatttagtattttaatcatttcaggatttgacgtcaacactgagataccaattccttgaaggattacgtaaaggaagtgataggttccacttgagttgcctaggttatacaagcactccaaagacacttccacaactggaaattctagataatagcatagtctacactaggataaagacattttttgactcaactgactattgatagtgaagagattatcaatccaatggccagtatcattaaatacaatagatcgaatttgtaggcttacagcatatctataaaacaaacattcatttattcaataaataaattgtacctgctactggtatgcatgtatgatgaataggtattatcccattttacagtgtggaggagagagtgaggaggaagcacaaggaggcaatggggtaagggaagcagcatgtatagggcttaagagagcattgttaaggcttagctattcaactccctggagaaggagagcacctgaggggtttcaagcagtgaagttacacgtgactcatgtttgaggtttaacaggatcactgaggctgctaggttaagatcagaccaattggtggggaggggagcggtgtgtacaaaggtgaaagcagggaaaccagttaagaaaagattgcattagcacaatggagcttctccttatcaggcttggcatcgttaattccatatctctgttcactaaagccaactttactaattggtcaaaacagccctgatcaaattttttttttatccaaagagcttgatacatgcatagtttgtgtgaagcaacagaaaacaccaaaagtatgccatcgaaattatgtttccacaaacagaaccctctcttttattacactcaaaaaagtccagagttgagagcactgggaataagcatacagtgctacctataacttggacttctgaatggtcttctgtcctctcttgctgtctccactcttgttcccctttgatccatccttgttcccctttgatccatccttgttcccctttgatccatcactgtttttagagtgatcttcccaaaacagggattacaggcagtggctcaagccaagcctgtaatccgagcactttgggaagccgaggcaggtggatcacttgaggccaggagttcaagaccaacctggccaacatggtgaaacccgtctctactaaaaatacaaaaactggccagactaagccaaattcagaaagtatttgcttagcacattagcctgtgcacaaagcaccatttaatcgagtcccagatgtgttaagtttacccattcagcaaccatttattgagcacttagccttggggataaaaaaaaaaaaaataagattgagtctccatcctaaaacaggtcacggctagttcaagacacagacaagtaaacaagtaagcataagccagtgtatgataaacacgattagagaggaatgaagaaggcagagaaataacatagagacaagagccatcagctctgcctgaggatgttagagaagacttcacagagttttaaagcgagtctagaaggataagtaggaggtcaacaggcaggggaggcgactcgagcaccctggcacagggaataagagggaacgggaggtgccagtttctggagttgtgaaaaagcaatgagtctgtatgctagttctgcaggggagaggacggaggcagatcccgtaaagtttcacgccatgtaaagtgatgtaagctccattctgtaggcaatggggagctacagaaaggtgatccagttgtttttgtgggtttttctgtttcttgtttttctgagacagagtcttgctctgtcacccaggctggagtgaagtggtgagatctcggctcactgcaacctccgcctcctgggttcaagcgattctcctgcctcagcctcccaagtagctgggattacaggtatgccgcactaaacccgagtaatttttgtatttttagtagagacagggtttcaccatgttggccaggctggtcatgaacccctgagttcaaatgttcctcccacctcggcctccccaggtgctgggattataggcttgagccactggtcccagctggtttttgtatcttaggaagatcactctggagacagtgtagactcatggatggatcaaaggggaacaagagtggagaaagcaagagaggacagaagatcatttagaagtccaagtaagagctgatgagggcctacgctctatgaggacggacatctaggtgcaaatacagcagacctttaggagattaaactgaagtatttgatagaaaatactgtagttttcaaaaaaaactctaggctgggcatggtggctcaggcttataatcccagcattttgggaggccaaggcaggaggatcacttgaggccagatgttcaagatcagcctgagcaaaagagagagaccccatctctacaaaaataaaataaaataaaataaaataaaaaattagaaaggcatggtaccctgtgcctgtagtcctagctactcaggaggctgagcggggaggatcccttgagcctgggagttcaaggttacagggagctatgattgtgccattgcactccagcctgggcaacaaagcaagaccctgtttctaaaaaaaaaaaaagcaaacaaacaaacccctctaatttgacagaacatgttatagttaaaccaaaacaccctgaaattacatggaaatatattttataataattgcatgagacataaaaattaaccctagataacatgcaggatcttttaaaattattaaaaacaaactgttggccaggcgtggtggctcacgcttgtaatcccaacactttgggaggctgaggtgggcggatcacctgaggtcaggagttcaagaccagcctggccaacatggtgaaaccccgtctctactaaaaatataaaaattagccgggcgtggtggcgggtgcctgtaatcccagctacccaggaggctgaggcaggagaataactagaacccgggaggcagaagctgcagtgagccaagattgtgccactgcactccagcctgggcgacagagcaagactctgtctcaaaatcaatcaatcaatcaatcaatcaatcaataaaaagtaaactgttcataaagatcagtttcaaagaaggtttccataacttagcaaagacattttaatggaaaagaacataggttactcacttccaaactcaagccctgacaataagttgcttctttttatcactcttaagatacttttcataatttaaaaaaaaaccatatttttcataatttaaatgcctcttctcaaaacaaatgcacaaagtttttaaactaaaaaaggaaggatactagataaaatatcatttaaatcgaacttcaacaatttaatttgcaaataaagacatattaaaatgaacaaggcagtgagacaacagagtcccaacttcagaagaaaaaataataataatcaaaggtcaataaagggcagtctcaatggaccagagaaaacattaagtggcactcactgtgtgtctctttcacagaatgtcaacttcagtaggaagtaagagcaaaaccatgacattcactgatctcttttgttaagacacgaaggtaaacttcctttggctatttttccgatatatgtagtaaccatcagaataaataaaacttactgatcttgtttcactcttaaatttgtgatgctacttgacaatatttgtcaatatttcttaggttttcttaatgccagaaggaagctatttttttttttggaggatttttgtttggtttgagacctagtctttatgtttgtttggttttgagacctagtctcgctgtgttacccaggctggaatgcagtggtgtgatctcggctcactgcagactcgacctcccaggctcaagcgatcctcccacctcagcctcctgagtagctggaactataggcacacaccaccacacttgactactttttctatttttttgtagagacaaggtttcgtcgtgttccccaggctggtcttgaactcctgggctcaagtgttatgcccacttcggcctccgaaaatgttgggataacaagcatgagccaccacgcctggcccaggaagctattcctaagtcccaccaatttaaggattttattatcagaaatagatcacagctatttacatggaaacaggatcttgacttttgacctagctgcttttggtttttcatgtcatttttctccactgtaatatctggtcattagtaatctaattatgtgcaaggatcctgctttctgcaactattttattaggagaaaaactgggatgaaattactttaaatagatccaactcccacactcaaaaattgattatctagtatatggattattcattacccttgatgcctagtatggtcattctctggccatttttgtagtggctgagaagggaggacactgacattcaaatgattcaaagctggtaacattactagtctgtacgataaagtccagaaggaaaggatgaaacattgttcaaagcaaggctttgcatgtcaattaccttctctatctgctgacctgccaataccaggatcatcaatcacgcttctgcccagctaaatggagagctggggatacaacaaaacaagctctgctcaatgagaagacggacaccccatatgattccacctcttttagttttatttgagtgagcaagaaagggaaagcacagaataaatactactagtcattagttttcctcaaggaccttccacagtgctggaaaagcagcaggcactcattaaatcttgttcagttaaatgctaacagttagaagaccatgcaaaacatgaaaatgttccagataaagttcctttatgcggaccttctcatctaggtcatcgtgttgcactttttcacaattatcctacattttctctttaacccccctgctttagatgtcttatttgcttctccatttaagcatgaactccatgacttcagggcctgagtgctatctttctttgtatcctgcacatagtattcagtaatgattccaccaataaatgctctcacaacttcacgtgaaaagttacatattgtcttatctaccactgcattccacttttttactataaagaagacactgattcacacccttgatttgtatggctaattaagtcaaaacatcatctactactgtagtgggtcatatcatactaggaatataagaattgatcattgctgttacccagttcattcttacctctctgagtataaacggggatgggattcaagagaattttgaaacttgtagtgtgctgtcaaacacacatacaaaagaaaacatacagatgcttactggtggctgctttggacctatcaatatgtatcttgtaattactttttaagctgaggaacagtagtctaatcagaaaatgcatactagtagcttctaatcgtataaaaagattctcaaaagaaaaagaaaatcaagcactataattttatccctagtttcttgacattaaatcataaagctatgggtttgttgtactgaaagatacccataagggtaaccacttaaaaactttattttgatgttcctgataacaatccagcatagaaattccctattaaaagaccttctgtttcagaaattgaatgtgtgtcatacaacacactatccacactgatggtaggagctcagcaggctaatggtgcaaagcatacctggagacagcgggcagggaacaggcaagcagtgtggcctggcagcagctgctggaggggagggagaacgccaggagctgcagaaccggacccccgccaaccagagatcccacagggggacaactgatgcgaggctagcttgttaagctacagttgccctacatctagctgtcactgcatgatggttgtgtgtatatgtgtgtgtgtgtgtgtgtgtgtgtgagagagagagagagaaagagagcgagagagaaaaagagagagagcgagagagtggggaggagggagagtttttggcaatctgtgtaaatcaaaaaatgttaatgtaagttaggggggttgcggaataaactgaaagaaaggtggattaggctgtgtgtgatttgggcagagagatataaaagatgctacacattcccatcagaccaatgtgtctcccagtgcatatttatttgcaaccaaatcctaacgtggccattgggcattcttagcattgactgataatccttgctagagtttcagcctatttgatgcttctaagaaaaaacttcatttctgcatattttttcttgaagacttttcctcttttgatctgctcacataaacaaatgtcacttctgtatttctccaaaggaaggaattgtgtggaataaagatcaactgttataacattcccctgagacaagatgtcaaagttggaagccaattttcttttgtaagtcaaatgcgaaaacagaatataatgccatgaattttgatgtataagcagctttttaaggattctttctgacaccgtatgtcaaaaatcatattattcatgcccaattatttaaaaaaaaaaacacataaacttacaccctgtattatgcttccatttatcttcatgaagctactgtatcccctattccgttaagggataaagggcacaatcttttgtatcgctacgtaagcaagtcctcccttcacaagttgcccctgtcctttacaatgacttctttattttccacaagtcacatgtacagtatttgctttatttcccaactaaaactaatacacacaaattcagtctctgttcctttaatgctaattcagatgaagcatctacagtagaaatcctacagcctcatgctcacatgtatacagtcgttaacagagacttgacagtggttgacttaaagtcaaacaagtcctacaaagcaacctttggcaaagcccaaaggaatcaaaactataccctcctgcgaccacagcactactgaatccaccctccaaacatttttgtttcaaacattacaacccaatcatttaccaaaaccacagcttattcctgatttagaaaagtaaagttcacggacttactaaactatacaactccagccagaaagcacaaatgccttttctaagcctggcaatcacacagcatttgaactgaaaacccacatttttaagctcagaatcagtggctcattgttgatcaccttgttgatacaataaacaactgatatcttcaaagattattagctagtccctcttgtgccatagtttaacagacaagaacaaatagtttacacacacattcactctgaagaagggctgcattaatgctcagcctgtgcgacataattactatactcataagcacatatttaacttagttgattctctcacgtttcagtagttttgctttccaaagcagggggaagcacaggtccctgaaagactccagcaaggtttcttttggcatggggaagaatgtgataaacatggaaaacacaatcacgcggaaggtctggacttgattcctttgtgatacttaaatagcactcccctactgggctttgcccactgcaccgaatggagaaaccattttagagcttaacaattcagtccctacacacactaagaggaagaattcagaaaatctaaatataaaataggggtgtgttaagaaatatcgaactgtttccctctctcccagcaggactggtattttttttcatcttggaggcaaaacatgttaatcctgagaacagagccaatgtcagtctgaaaagaaacttgatagaaatctaaaaactctggttaaaagaaggaaaggagaaagaaaaaaaaaatccagaaactccttgggaccaacatatcagtgttaagccccttgcgtgttcattttccttgatgtcacagcccaacactggtttaattcaagcattcatgtaattcctcaatcttagaagaaggatgcaagaagactatgtacgattcccgaagttttctcagtgcagtttcacaagagttccacgttctagccccagattgctataagggcagaagattctctctagctagggtggtgggtggtttatcattgaacttttcacaagtcacatgagcatgtggctctgatggagggagggaggctgccgagaacaaataacagctactttatctttctttgaatgatacaagatacaagctcaagctgaggaagagcatttttattttagacatgtaaacaaatgacgccgaattccaatacaaaaacaaacatttcaaaagaaactcctaatgggggcaaaaatcatgaagggggagtgatagaaacaaagaattctacataacaaactttttcaaatgtttaaattttttaaaaatcgagtcaccttttctgggctgggctctgtatatccagttttcgtcatccacttccacctgctgcccacaaaccgagagctctccatcactgcgaaacagcctctttgtctgcctggacaaggaggagaaatttatccaacttacagcacgtgagagagaacctgtattcggctggagtctgaaggaacctgaagagccttcctttttcatcttcttttcaaaatcaactagagacaaagaacagcccagcaaacaaaacgctgggttttttgcgttggcccaggtcctctccacgagcctgctgtttccctcttagacaacgctgacagtcaggcaccgcattatccaaaaagacggcttctgtgtcacccaattaaaaagaaagggaaaaggaggggttaagaaagaaaagaaaaatgttttaccctagccacattgtggactccgtttctagatccgcgatatccacggccaaaaaataataaacaaataaaagtataatttaaaaaatgaagcagcgtgttcatttcaggagtacttgtcaggactttgcaaaacacaaagccaaggcaccccgactctttggcgtgtccctagcatcccaaattgtaatcctactcctctcctgggcatctttccccaccagggcagaaagccagctgccctggtgaagtaactcctcaccctagagaaaaagagtcagggtcaagccaggcacccagtttacagttcacccacacggttacttgggagaaatcaaagagctcagctcactcgccccagcacagggcagaatcataaaccgcccacttgctctccttcccgtctgtgaagcgctcgttcagagccgcaggactccgcaaacaataaaaccggctgcgtggctattgcctggattacagagcaagcactcctgcgaaagacgataggctttcccgacaccaaaggcacctcattggagacagaaaaccccgcctctccacagtcaatacttcagtggcagctcaaacttctgaactttagcgcagctaggggtatgcaagtctgtgcagaatacagacttctgggcataaagaaaaagaacttgattatgaattatcaaaccatacttctgaaactacaattttgagaaggggcttaatacagtagatagatagatagatagatagatagatagatagatagatacatccaacattcctagatggatttaggaatgtccatcatttaaggaagtatatttccaaagagaatataacggacccggctattcactcccagcttccaacaaaggtgaaacgcagccatcattgtacctgttactgtcactcctgcctgtcaccagcagccagagtgtggggctggatcctcctctgccgtatcactgggagcccctgggggttattcctctccaaccttgaatgatcatcctatcacaaagagtcatcagagagctacgctagtggcacttagctgcaggctctagccctgagcctcctctgcaaactatctagagccacagcttgcaatgcatttgggtgtagcatttcacccaaggctaacttactacaattccacggtcctaggggtgttaaaagtccctgcaactttccatcatagagacttgggtcggcatctccttctcccaagcgttatttggggtaaggcaaataagcaacgagtagagaactaggtctgtagcactttgctttactcagcatcgatcagatacattaaaattaacaaactgcaatagaaaataaactgattaaaaattttaaaaccagaattttgcatcatacatctactccaattcactgagattttaagaagaaggctctacaagcttactgggacaggaacacttgtagaagatagtcagaagttctacaaagtgttactaagataggcagttcatattacaccatgtaaataatgacagagaacaggtattactaaggcagaagctacaaagcagcctcagtttaaaagctaaaagagtccttgagatcacgtagtttaaactccatgattttcagataggaaaactcaggcccagagaaagtatgttcatacccaatgtcacacagagaagtcagtaatgaggaccaggctgcagccgacaccacttggatcagagattcacacacttaccagggatgcttgctacatcaccaagtgctctgggcctgtttcagttattaattgcaataatatctccactttgactaccattattttattttcttttttttgagacagagtctcactctgtcgcccaggctggagtgcagtggcatgatgcaagctctgcctcccgggttcacacc

SEQ ID NO: 400 - DNA, 32850 bp, Homo sapiens
  source 1..32850: mol_type = genomic DNA
actcccaggagggtccgtgtgcccttgttcatgtgctcgcccacagctcatgtatctgcggacagccagcaggggaggctgctggggtggggggcgggcctctggtttaactttccgttttgccactgagcagcctaggcctctgtaaaatcgtgtgatggcggcatctgccccgaggatggtctgagaatgggaggcagtaattggagtgaaagggcttggctggacgtcagctccagaggtgcaagtcagcactgggcagccgcggagctgcgctgctcagctgtgagacagggctccagccaggggagtgggaacagagagaccgggtgggacctgggccagcttagcggaggcctggcagggccggagctgggcaggtgaggggtcccgcaccgccagcctcggagctccaactccagggacgggagctgccctggcagaaggtggggtcacccactgaggttggagacgtgggcgtggcaacagcccgtggggaaaatgctgagctagctcttgaaaggctggggagatacaatgtatcaatgcaacagggcgtggcagggaggagagtcatgggtagggaagggagaaatgtcccagaaacaggagcaagttagggttccaggaggaagtgagggaagaaggttcctctgaaggtaaataaggaagagagccctgaggtacccagcagggtaggaggcagagagggggtccagtgaagggtactgagggacgggtctccagagccagctggaggagcttgagatgaggccagggaggtagcagctgaagccactgagttggacacgtggaggaggcagcgcaggtggccaggcttggggctcctgggaggctccaacaccctcaaggcacaggtcggaggagaccctgctcaaaccaaggacaaagtgagggggtgcagggcccttccagccggggccggggggggccaacgctggttcttcatcaatttggagcgccaggagagggcggggatctagtcctgccggataccacccccctttgggctgcccacacccccaccccctctccagcagccaagggaggcgggtcctccctttcaaagggaggtgccctcaggctcctctggaattggggatcccttgacccaggacggcctggtgaggggtcggagctgactcccgccaggctccgctgcagcacctgaccgcccccacaggtggccgggccgggtcctcatcgctggtggggctccaggctgggaacgggggtcgaggccgatgcgctgcgggcagcggccgccgggggcgctgcgggggccgcggttaaagccccggcgcgggcgcacgcgctcagagggagccgggccgccgtcgctgccgccgctgtccccgcgccctgcgcccggtggccccccacctccgccccgcggccgtacctggcgccccctggctcccccggcccccgcgcggcgtggagccatcttccctcacctcctaccggcaccctagcttgctcccggcccatgcggcccccgcgggctcccggccccggcttcagaactcagccctgcacctgagcgcggggcccggcggggcgtggcggcggcgatggggaaactgcagtcgaagcacggtgagccgcgggccggtagggcgggagggcgggcgggcgggcgtggggccgcctctcactgtcgttttcctctccccgcgtcccgccgtgccgcagccgccgccgcccgcaagcggagagagagcccggaaggtgagcgggcgagccgacgggcggggcggggggcggcgacccggcccgggaccctcagagctaggagcccgcgcgcgtcctgccctggagccagcagtggggggacggggccgcgggtctccaggagcgcgcgggacccccacgcctgcccctgcgcggtctccaggcgatggggacacagcgaaggcgcagcgcccgcggggctcacggcgcgtctctttccctcctcggtgcgggtttcccgcgcgtccgcccccggaccgcaggggacagcttcgtggcgtccgcgtacgcgagcggccgcaaaggcgcggaggaagcggagcggcgcgcgcgggacaagcaggtaggcggcggggcggaggctggggtcgcgctgcgcacccgcccgggggcggggagcggtgtcagagctgttcctggtgcccgcccgcggacaggcgagacgtgggccgccatggccgcacgagtgaccgggggccaggagagccagtctctccccagcctccacgacgtctggggctcccgtggggcgagcccttgctagtgtcccatgctgagtggcgggtaggggaatcggaattccttgtcctaggctgggagccgtgtgggggctccatgtttcgggctggaggagctgggcgagtgggaggggctggacctagacgtcccgggctgggggtcccggggagcgggaatgcagtaccccggctggatgagctggaggagttggaggaggggtgggagctacagacctggggcatcactggtcatagcctcagtgctcaatcagcaaacatggccagagtcagaggcctcggtgcctcccatctctgggaggggtgaccacaggcctgctagaggctcaggagacagagggacatctgcacagctgtggcaaggctgcagagactgcaaggctggctcaagagccaggcggccctgagggtgggtgaggaaggtgctatgtccaggagcagagaactgtccaggtctggggccctggaagggcctggggtaaattagacctgcatgtttgctgagcgtgagaaagctaacatttgatggtcatcagtgtcagtgtgaactgtatcggtgcagacagccccaccaggtggccaggcccacacttgccccttgcttcctcccccactgtccccagaggtccccagacacagaacatgccgggtcacgcaatcagtttcctttttggaaagacattgttctggcagttgattaaaaaaagttctgggtgtgtttggagacattttctgcagctctgtcttgagaaggggcttaggtctgcttggaaattaacatgcaatagagttaggattggtgcttcctgagagtgaccatctaacgcctgtgatggtgggaagcacgctgtaaggtacagtaagttgggtggtcctgtgagcctctatccgggacagggagaccagggtgaggtcatccagggagctgtccccgccccaatctggctctctctgccagttacatttgcacaggggcttgctggtgagtggatggtgccacttagcagccaggtgctcctggtatgattagtcagtgatgtgagcacctggggtgggcgggcgttcacctctctcgtggtcagggctttggccggcccctgtccattggcccactggcctggagccttctccctgggaggcgctgcaccatgaaccttaaaatccctgagccagcgccctcaccatgaagtgcagctcccagggccatggggcaaggccagtgcgctctggaaaatgcaggtgctcctcatgtgactacgatgtcagcgtgagggctgctcgtgggcgtttagacctgccactctacactgggacattttctttagagaatagcttgggaattggggcttgcttggattgttaccttctaattttgccatcatttcatgaaagaaaactcctttctaagttaaaatgaacaaactcagaatcaaaggctgtcctgtgaattaaatacatttcagctttcagacaaaagtgctgcctttctgtattttccgcctctggccatgactcctcccacctggcatggagaccccagggcccaggtgcgccctcacctggccaagtgccctccctgccacattgctgttcctctcacctggcagctgttccccctgcgacagatcctactgacgtccaggagagtcgcaggccaccacagcgaagtgtccctctggctctcaccttcttcttttgtgttgtccagagcctcgcccatcgtccttgtcctcccaggtggtatccactgaggagggccagtcctgggtcacccagggcaccccttgtgatgcctggctggggccagcgaggggactcactccttcccttctccaaagtccacctcctggttccgtgcgaggcatcctgggtgccacagaacggtggcagagaaccctgtggagattgggcgcactaagagccaagacctccgacctaccctctctccccagcccccaaaataacacaaatgagattggctattattaattccctgtgagcaatgctggctcctgcctctgtacgtgtctgaaaacaccaacagcagcactttcccagacaggtgtgtctctgcacccccgacgtggctctccctggcgactctgcggagcgccacactttgcttttggcgggacccgcacggcttcatcaccgagtgtccctgaagggctagggccatgggatcactggtgacggtgccgtgaaggtctggagagtggattgtgagggatccggagtccctggggatgtgcgtgggtgaggagtggtgccatggtggcagtgcacttgtgtggctgtttttccaagtggtagtgactgcagggaggatggcttcaggcctgggaacaggctgcccctgcacactcaccctcaccatctggtctgcgagactagctttaatttctacagcgctccctgaggctggcggaaaatggttctgaagacaagagtcactgttaactggaatgttgttgtgaatggagcacaggcttccatgaagtagtgctgaggaagggtgcgctggggctaactccagaggcagcattgtagcgaacactcgtgacagaccagccagtgcgtggaggaggccgtggccctggcctgcacggggggctcttgcccacatctgcaggaggcagcaggcacggctctgagtggcccgtctagggcaggtcccagcttacaggaggcactcgccagtcccatccccatgccacggcccttctgagtgtgccaacatggtacatgtttcctggaagggagccaggaggaccacagtcgtaagacctgctggctctgtccagggctgagctccaggccagggcccaggccttcacctgcactggcctctggcttccagcagcaaactccatctgccctcagcatggccttgctcacgggaactgggctcagccccactacatggcttgacgccttccgactggaaccagccacagtgccccagaggctcatatgcctgcagctggccttcccccagaggcaggggtggggctgccccttccctgccccttccctgcccctcctggccacccaggagccagcgctcacctgtcctctgtgggtccagagagctggatgtggcagtgggatgcccagttcttggtcagtgggagcagtttcttgtagaagatcctggaaaattcttcatggcttcaagcacagtctggacgctaccgcatcaacacagagatgcagggtgggggcaagatacacatttgcaggagagactcgggccagtgcacgtgcgcccagagacaaggcagtgtggaccatactctgcttggtgctcggccacgtgccacacagaaggagaggttgtgggtgcccagtccacccagctctgcatttgggggtgcaagccactccaagatgtccaggagaatggcagcttccaaagggagcaggggtgcctggggatgcctccagcacagactctgagggccaaccttctgtcttctgtgactcatgttccgggaccctgtgtcctcatggagctgaggcccatgtggggctttgtgtcagagccggcggcagctgcagtgtgtcatggctgccctttgctttctttttggtgccctctgtgtgcctggcccttggatacaggcagccgtgttcctaccctgggatgtggcccagccatgtggcgaggccagcacagacatgcacagaggctcaggcacagagggaaccgaagggagttgccaggccacctggtcatccccccttgtgggaggcgtcgaggtcacctctgggcatgacacctgatgcccagcacctgagagccataggacgggttggataccatgtatgtagtttctgtgccagcctgggccttgggcccactgagggctgtgtgtgcgcccaagctctccaccaagccgcaggcatcccctgtcctgcagcaggggctctggggtgctgactgggagagcgtgctgactgggagaggctgctgccggtgcctggccatgaggttgggccagtggatctgtgttgcccatggtggaggccggaggctggccagtggcgtggtcctgcccgctcgggtcactgtacctggacagtgcagatgtgcattctcagtgtcggcccctgtgtctgtgaagtgcatcctgagaagccctgcacatggaccaggcaggtgtctggatggaggccctggagcacagagcgtccctgccacagggccttgggctagagttgggggtttcacagacgaggccatctggggcagctgtcacccctggacttccaaaacagcttcctgaagctaaaactgcccattttgctgctgaatgagctgaagttttagatttctgcaggtgaaagaagacaggtggctgcaccctgttctcctcagtgggctgaaccaccatgggaagcctggtgctgctccgtcctccttccttcctacttgtggctgagtaatttgaattcctttgaggttttcatcttgttttggctaaagagcttacatctttccttttcttaaaaaacccaggctggtttgcaatcctcggaaaccaatcatcagccctgcagctttgggccgccgtatgcctgcattagggtgttgggggtccatcagacgcacacgcgactcctgggagccgcgggaactgtggctggtgccggccaaggcagttgtgccagaaagggcagggccgtctcgagtacccatccacgagtgcccttcggtgccctgggcccctgctgtgcatgcctcccgtgtgagcagcaaggtgatggtgagattggaaatgcagtttcatctgccttgtaggagtggctggctctcctttgcccctgggtgggcaccgcttgttcagagctggcagtaagtccatggccaccccaggtccaggccccgactgggggaaacacacaccttgccactgtcctgtctaggctagggttgggggttcggctctttctatttctcaggaagccaggagtctgggccaagggctcctgtcctccacccccgctttgcggccaagggatacccacttggtcagccccgacagaggctgtgaatgaagtcctagtcaaagaccatagttgggagccaccatatggccgtgttacgtgtggccccctcgccagcaccaggtttctgtcatcccatcgttagcagaggcggcttgcatggtggcttgacagcctctggacccggcttcggacccggtgctgccactcacagcctggccacatccctcgtgcctgggccacctgcttccccttgtggtcctgtgaggaaagacaaaagggacagctccacgctccataaggccaggcagcgagggccacctggagagcagccaggtgtggccgggccccttcctggccttttgccccaagtgccggggtgctgcaagccagaggggtgcgtgagtccgtgagcttgtgccaagatgctgtgggcctgattcgtactgcacagtcatctgagctgtcagcaagctctcactggttggcagtgcccacagcctccctggcgtggccaggtgtggtgggagcagaggccagtgggtgggagtggggtccaccgtccttcctgtagagaggaagcctctggcctcctggctgctgttcttgagttggcaaagccacactttacggaagcggtagttcttgaagccagacacacctgaatttggagttgcccagcctaccccagaatttgtagacagctacctgccagatcactgggtccctggagctctgaaggctgagccctatgtccttcctgcagggctctcagacagatgcctgcatcagaaactccctgggttatgacgaaaggcctatgacacccctagggagttggggaagcctcaggagcatcaggaagcaggaggaagcaggagccactgctggggtgaggtcagcatttagaggcggtcctgcccgcacatgctgccgccagcatttcagggtgggctgctcccagcaggactgcagatcggcctgtccatgtgtggaacccgagggggcctgtgctgcgtcctggggcattcatgctggagggttcctgtggctccgtcctctcacaggtcttaccagccgtggcccctctcctgttggacttgccttcctgaacatggggaggggtcccgagcccaggacccctaatcagttccaagggctccagagctttcagtctctgccaccttctgagccgtcgtctgtcacagatcatgaccgtcagctgtccctggaggtgcggaaggagcccttcctgtggggctgctgggttaacgccggaaccatggggagcagaaggcgcggtgtgtgagaggggtctgcccaggtagcaggatccccccccacaccggacacttccccagcgtggggcggagctcgtggtgctggcctggagggacacacggtgctgacctggctgccgcctctggactgcgaagcctggacctgctgggacaggagccttgcagagaccccgatccgctctcacggcgagctgcacccatgctggctgatgggagctttaatctgctttcatgttggcaaatacttggcagggcaccctttggcagcctttcacgctggcgtgaaacaaattgggtctgttcgatcctgtcctgcgcagagctggaattcactggtggtgatggccagcccttggcagctggagggggagggtttgttttccttttgttctgcagaattttccaaggaaatcgtaaatagttttgcgcaccaaaatcagagaagctaaaaagcacgaaatattgtaatacaaacattcaaattggagattattttaatggtaagtgtcttggcggatttagactgagagccttgccagaggccgatggaaacgggggtccctccttgctgtctccagtgaggttctccgtgaggcactcacgtcggtagctggcaggaccctccagggctcccacctgcccttaaggccgtggtcctgcgtggatgtacttccaggacgaggcctctcacatccgctaagggggacgtgacaagagctacagcagctgtttttggataacagagcctaccccatcctcctttccacaaaggataacagagccgacctcatcctcgtttccccaaaggataacagagccgaccccatcctcctttccacaaaggataacagagctgacctcaccctccttcccacaaaggataacagagcagaccccatcctccttcccacaaaggataacagagccgaccccatcctccttcccacaaaggataacagagccaacctcatcctcgtccttcccacaaaggataacagagccgacctcatcctcgttcccacaaaggatagcagagccgaccctatcctacttctcaccaggacgtgcctggacatggtgcaaagctgctgcccctggtggcctccctgctgccccggggacgtgggtagcttggctctctgtggctggcgtctgggcctcagcgtcctggggtcctcagagggaccccatgtccctctgcccaccatcaccgcctgctctcttggctgcccaggtgcacccagctcaactgtcccgagggcgtgccaggccagtggccaggtccgtgtgccctgcacccttcagggcagccactcatgtctgagaccagccagccccagacagagctggagcaggggccatttcagtggccctgattttgctcctgagggctgtggtgtaacacgaaagaacgttgctgtaggcttccagccgtgggattccagggctgtctttgccttgtgctgctggacagagcaggacctgcacctctgtttgtcacaggcttgtcctgggcaccgcctcaaaaggaggaaacaaaaacagaagggctgagtcccggagccaggaccccaaaccagaagtccctcccagagcccacagccccccaccacggggccgccctgcagccccagggcctgagctgctttctggatgctgggagaaccggacagtggctgctggaaggcaggcctggagggctctgggtgctggggtgcgggtgaggccgggcatgggtgcaggcctgtggtgctggggtgtgagagatgctgggctggagtgtgggagaggccaggcaggggtacagggcccgtggtgctggggtgtgagagaggccgagctggggtgcagggcctgtggtgctggggtgtgggacaggccaggcaggggcgggggctgccacttgatgtgggtgtcaggacagtgtgtggtgaggaggcatggaggaagcgtggccccccagaggcttccaggctgggcagccactgcaaaggccctgaggcaggagtaggcctggaggacgggacggtagcaggcaggggctgcgagagacacagcggaggaagaagaatggcggcccccacccatctccctctgccagaaggagccacgggcacagcctacagatgtgcactggtctctgtgctgtgggaggccagacctggtgtctgtgaggagcaccacagctgcagacctgccggatgaccctcgggtgacactttggggtggaagaccccacccaccctgcaagccatgttcctcgggctccgagccccatcctcacatctgtggagcaggtgggaccactagcaggggcttctggcccttcctctcctcccattgatttgttgaaagcgatttaggttttctgtaaaacaaagcggacatgggcctggggaaggtgcttgcgggtatttcatgagcttttctaggcctgagacatgttttaggtggcagcgggctcacgtgtgttggggggagagactggtcacagtcagggcgactcaggggcttgtgctcagatggtgacgcccagcccccttgtccccagggtgacagggagaggtggcaagaactggcagctgcccacaggctgagccgagcccagcagaaaggcccaaggccggagcacagaggtggcctggatgcttctggccggtggtcaggaccctgccaggccttgcttggaggcatcttgtgtatgaggggagccctgcccatgccaaccacctagctgtgcccaggggaagccgccccagaggcccattctcggggtctgtttgcctgtcgtggggagagagtgtcacaagctgggcccacagggaggaacatccttggcctccgaaagggcagagagcaccatccctgctttggggcatctaggggagcagcaggtggggacgtcacgcctctgtccacagcccagtctgggagactcagagccctgttggtgagtcctgggtcaaagggcatagcgaccaggccagagcgtcaccttcccgctatccctgtggcggggctgtgattgcctctagctctagtgaccggggcggtggtcctggctgcctgcacctcccctgccaattatacccactataggcacccctgtgccagctgctcctcttttgcggttggagtgaccccaagacgtgctgtaagggtgtctttgtgtgcggctcagagctcatcccgagaaccctgcagcctccaggccttggatccggtgcccttcctgagacgagattgtgtgtcccgtaacaaagatgcgcgtggtcttctctgaacaatttttacctctcacgcgggggttctcaccgctctcccctgagagtgggctgtggcttgtgtggacggcagccgccaggcatagcccctgccccctagagccctctgcagcctcggccaatagcaaagccgcaggtggccactgggccctcctttcatctcgtggagcctctcgccagccacagcagggccctcgtggaggttctgagattgtcgcgtgcagggcatgcgacgggggtgctttagagaaagaaaaggccttgattacttgtttgagtagctcagtccccagggtctggagctgtaatcaaatataagcccctcaaccagcattttccgctgtttctctttggtaaggacatcgacgttgcatgttcacatatggtgtcttccaaattagaaaaaagaaaaccctgaaacgcggcagggttctttccagctttggaattaatcttcctttgaaataggaaacatgaggctttaatatgaatgaaagaaaacaaaaacgtccggtgggtttttcccggggaagaattcagatagaagagaagtggattcgggtctgctttcaatcccagtggaattcagcctcctctgagtggggcggttgagggtgcagcagttcggaagttcagggcccgagtcgtggttttattttgtgtgttctgcgctctggatggtaagctgagggtggcagctgaatttggaaggttttcctttttctgtgacattggggatcgttagctctgaagacaaagacagtagcaggcgtgactgggagaagaaaattagacctgcagatgagttgtgaaatggttgtctaacattcagtgtcagcacttcaggatgctgagagttgaaggcagggaataaagtttcggcagagtttatgatcacgcctctattatctgggcaggggcgcacacacgtatatgtaggtgtatgtatgatgtgttcacatatgtgagtacacacgtgtatacatacatgtatagaggttacacacacatgtacgtaggtctgtatttaatacctgagctgaagacatttcatttcaagacacctgctctccacccccaccccctagtcaccctgctcagcctcagccacacctagctgacgatggagactctgggagggctgtgggttcccattcctgagccaaggtgtgggcccagtggcgctcacagcttccccctcccatccgcgtcggttaatgcgggtaaagtgctccctgagtccctctctccaagcgtggggagagggaagctcggctgcctggtcaaaaagccaggtcttgctgaccacgtgttgcttgtctttttttttttttttttttttctgcatgtgttttacgttggggtttatttcatgggcagggcagccctgggcctgtccctgtaactcatctcttcacttccacttgtaaggatgccccgtgggttgggctgggtgcccctttaccccttggtgtggtcagtcgtccccttaggctgagcgtccaccctcgtggcaggggtgggcactgcagagaccctccctgggcttagggcgtttactgggtgagggggcggatgccaacacaaaagccctgtagtgagggagtgaggggcgtgggtagtgtggcacctccacgttttcccatttaaacaatccagatgatgaaaagctgctgtgaggcaggatgaagagggagacagaaacatttctattttctggtcttataggaagttaagtcgcagcagaactctggcttgtgaggacatctgagtattttaggagaccttttgaccccaaagttactgcttttctaggtataaatttcacatgtggttattaaaagatctctcaaacccagaagaaccgatgggcaaaatctgcaaatgcctctcagatatggaggctccgtctgaatgtatctagggcttatgtgggaagcccggctcccctgcccggtccccccggccccccacctcccagcccctttgctcctcccgctgacccggccccccgcccctccacccacccacccacccacccacccgtcccaacccctgcccccgacccagccccccccagcccctccccacagggcctcagtctcatagtacttaaatctttcactttagaaccagaagttcagaatagcaagcacagcctggaaggaactggcgcacagtgttgctgtagcctttctgggccccagctgcacatgtgtcggaattattaagcccgtaaaactacattgtcacatctgaaactgtttagccattgaaaccgagactttgacttcaaagccggctgcggggtttccagacaggcgcgctggcggatcaccttgaagtcaaattccatcctatggcggccggcagaagtgggcccccggcacctccttgtaagaaaacactctcttccgcagacgccggtggcaggttcccccctcccatggtgacattttggagaggcttctttgcatctgagctcccagcagggataaggcggatggggtggtggtctttgcatttaaagagccttggaaaccactgctccccaccaggccccaggccctctgcctgctgctccgggcccctcccccagggccgcctgcagcctgctgcgaccaacccctggcctccttccctgtttcctgctggcctcattttccaccttgtctcataaggtgccctcccaccctccccctaccgccagtcgaaacggggtccttgctgtccttcagccccagagcctgcacccttgaccttgctggcccctgtccaccagtagccagtggcgctgtccctgtccctgctcttcccacctgctgtgggtgtcccaacccattgtccctgctcttcccacccgctgtgggtgtcccagccctttgtccctgctcttcccacccgctgtgggcgtctcagcccattgtccctgctcttcccacccgctgtgggtgtcccagccctttgtccctgctcttcccacccgctgtgggtgtctcagcccattgtccctgctcttcccacccgctgtgggtgtcccagcccgttgtccctgctcttcccacccgctgtgggcgtctcagcccattgtccctgctcttcccacccgctgtgggtgtcccagccctttgtccctgctcttcccacccgctagtgggtgtcccagccctttgtccctgctcttcccacccgctgtgggcgtctcagcccgttgtccctgctcttcccacccgctgtgggcgtcccagccctttgtccctgctcttcccacccgctgtgggcgtcccagccctttgtccctgctcttcccacccgctgtgggcgtctcagcccgttgtccctgctcttcccacccgctagtgggtgtcccagccctttgtccctgctcttcccaccctctgtgggtgtcccagccctttgtccctgctcttcccacccgctagtgggtgtcccagccctttgtccctgctcttcccacccgctgtgggcgtctcagcccgttgtccctgctcttcccacccgctagtgggtgtcccagccctttgtccctgctcttcccaccctctgtgggtgtcccagcccgttgtccctgctcttcccacctgctgtgggcgtctcagcccgttgtccctgctcttcccaccctctgtgggcgtcccagcccgttgtccctgctcttcccaccctctgtgggcgtcccagcccattgtccctgctcttcccaccctctgtgggcgtctcagcccgttgtccctgctcttcccaccctctgtgggcgtctcagcccgttgtccctgctcttcccacccgctgtgggcatcccagcccattgtccctgctcttcccaccctctgtgggcgtctcagcccattgtccctgctcttcccacccgctgtgggcgtcccagcccgttgtccctgctcttcccacccgctgtgggcgtcccagcccgttgtccctgctcttcccaccctctgtgggcgtctcagcccattgtccctgctcttcccacccgctgtgggcgtcccagcccattgtccctgctcttcccacccgctgtgggcgtcccagcccattgtccctgctcttcccaccctctgtgggcgtctcagcccgttgtccctgctcttcccacccgctgtgggcgtctcagcccgttgtctctgctcttcccaccctctgtgggcgtctcagcccgttgtccctgctcttcccacccgctgtgggcgtcccagcccattgtccctgctcttcccaccctctgtgggcgtctcagcccattgtccctgctcttcccaccctctgtgggcgtctcagcccattgtccctgctcttcccaccctctgtgggcgtctcagcccattgcccctgctcttcccaccctctgtgggcgtctcagcccattgtccctgctcttcccactctctgtgggcgtcccagcccattgtccctgctcttcccacccgctgtgggcgtcccagcccattgtccctgctcttcccacccgctgtgggcgtcccagcccattgtccctgctcttcccactctctgtgggcgtcccagcccattgtccctgctcttcccactctctgtgggcgtcccagcccattgtccctgctcttcccacccgctgtgggtgtcccagccctttgtccctgctcttcccacccgctgtgggcgtcccagcccgttgtccctgctcttcccaccctctgtgggcgtctcagcccattgtccctgctcttcccacccgctgtgggcgtcccagcccattgtccctgctcttcccaccctctgtgggcgtctcagcccattgtccctgctcttcccactctctgtgggcgtcccagcccattgtccctgctcttcccaccctctgtgggcgtctcagcccattgtccctgctcttcccaccctctgtgggcgtctcagcccgttgtccctgctcttcccacccgctgtgggcgtcccagcccgttgtccctgctcttcccaccctctgtgggcgtctcagcccattgtccctgctcttcccacccgctgtgggcgtcccagcccgttgtccctgctcttcccaccctctgtgggcgtctcagcccattgtccctgctcttcccacccgctgtgggcgtcccagcccattgtccctgctcttcccaccctctgtgggcgtcccagcccattgtccctgctcttcccacccgctgtgggcgtctcagcccattgtccctgctcttcccactctctgtgggcatcccagcccattgtccctgctcttcccacccgctgtgggcgtcccagccctttgtccctgctcttcccacccgctgtgggcgtcccagcccattgtccctgctcttcccaccctctgtgggcgtctcagcccattgtccctgctcttcccaccctctgtgggcgtctcagcccgttgtccctgctcttcccacccgctgtgggcgtcccagccctttgtccctgctcttcccactctctgtgggcgtctcagcccgttgtccctgctcttcccacccgctgtgggcgtcccagccctttgtccctgctcttcccactctctgtgggcgtctcagcccattgtccctgctcttcccaccctctgtgggcgtctcagcccgttgtccctgctcttcccacccgctgtgggcgtctcagcccgttgtccctgctcttcccaccctctgtgggtgtcccagcccgttgtccctgctcttcccacccgctgtgggcgtctcagcccgttgtccctgctcttcccacccgctgtgggcgtcccagccctttgtccctgctcttcccactctctgtgggcgtctcagcccgttgtccctgctcttcccaccctctgtgggcgtctcagcccgttgtccctgctcttcccacccgctgtgggcgtctcagcccgttgtccctgctcttcccacccgctgtgggcgtctcagcccgttgtccctgctcttcccacccgctgtgggcgtctcagcccgttgtccctgctcttcccacccgctgtgggcgtctcagcccgttgtccctgctcttcccacccgctgtgggcgtctcagcccgttgtccctgctcttcccacccgctgtgggcgtctcagcccgttgtccctgctcttcccacccgctgtgggcgtctcagcccgttgtccctgctcttcccactctctgtgggcgtcccagcccgttgtccctgctcttcccaccctctgtgggcgtctcagcccgttgtccctgctcttcccaccctctgtgggcgtcccagcccgttgtccctgctcttcccaccctctgtgggtgtctcagcccattgtccctgctcttcccaccctctgtgggcgtcccagcccattgtccctgctcttcccacccgctgtgggcgtctcagcccattgtccctgctcttcccaccctctgtgggtgccccagcccattgtccctgctcttcccacccgctagtgggcatctcagcccgttgtccctgctcttcccacccgctgtgggcgtcccagcccgttgtccctgctcttcccaccctctgtgggcgtcccagcccattgtccctgctcttcccacccgctgtgggcgtctcagcccattgtccctgctcttcccacccgctagtgggcgtctcagcccattgtccctgctcttcccaccctctgtgggcgtcccagcccattgtccctgctcttcccacccgctgtgggcgtctcagcccattgtccctgctcttcccaccctctgtgggtgccccagcccattgtccctgctcttcccacccgctgtgggcgtcccagccctttgtccctgctcttcccaccctctgtgggcgtctcagcccattgtccctgctcttcccacctgctagtgggcgtctcagcccattgtccctgctcttcccacccgctgtgggcgtcccagccctttgtccctgctcttcccacccgctgtgggcgtctcggtccattgtccctgctcttcccaccctctgtgggcgtctcggcccattgtccctgctcttcccacccgctgtgggcgtcccagccctttttccctgctcttcccaccctctgtgggcgtctcagcccattgtccctgctcttcccatctgctgtgggcgtctcagcccattgtccctgctcttcccacccgctgtgggtgtcccagcccattgtccctgctcttcccaccctctgtgggtgtcccagcccattgtccctgctcttcccacccactgtgggtgtcccagccctttgggttccttgggatccagacatcaccctcagccttttcctgagaggcccagctccagcccgtgtgccatatcccaaagctcccctccctgagccacctgccaggcactcacttcattctaccacgtccagcatcctcccagcccccgaggcaggaggtcactgctggcctggacgtggccttggtcctgcccagccgcatcccaggtgcctcccgagtgccctgaggtggcggtggctgcagcctaagcttggcaggcgcctaccttgctcctcaccacttggcatcctgcctgagccccacaaactggccctcgatgccacgacagccccgtaattctggcagccttgggcctggcagcccagtttgtaggattagccctgcagaacagggtggccacaggggtggtgacaatgaccacaggacatgggccaggctgtcaccccggcccttctttccagctcctgggggccccctgggcacagctcgagagccactgcttgacctgccaaggacagggaggtgcaccaaggccatttccccagtggcagaaacttcgagccaggggctccacccaacagggccgtccccaccacagtgcaaggtggccaaggcgctggggagccagagtgcagcctgggaggtgcctatggatctaggggtgccaggtgctgctggtggcgatgaaagctgtaggagaggcccgtcctgtgtcaggcggtgtaggagctgtgccttctggataacgtcccagacttggggttccacacccactccagagggacccgggagccccgaggtctggaaaatgctgcccgacacgcccacccagttctctgaagccttcctctctgtctctctcctccctccccgctccctctcctctgcctcggctcccatcacctccaccctcccaactcgtggggagacgttgggctccaggggatgctcccagcctggcctcctggacacgctgtggcctttgcctgttgatcggggttggtatttctagaaccctagaccagggtttaggtcatgtcccagagggccgtgacttcactgtggacacccgtgtgtttcccaccgggcgttccaccagagctgtggccaacagctgccctcacgaggcccaggaggggacagcgcctccttgcatttgcgagacctgggaaaggtgcctggccgtgcccacctgtccactgggaagaggacatcgcccgctccaggtggctcccagaggtgcctgcaccggcacttccaggttgaaggccaccaggatgatacctgtgttgcagctgcctggcgcctctgcaggggttccgacagacggggtggctctggggggcagtggtgctccagctgctgggcgctgccgagcgctggcacgtggggaacacactccttttgacttttccaaggaagctgggggttgaggttttgtgagcgtctctccgtgcctggccgcctgtggaggctgtggtttgcatcttaccgtctgggctgggaccaggacgggggctgggtgctgggaggacgaagcgctcagcccggtgcctgtggcggggatcagatgtcctcactgtcgtggcggggacgtggacggtggcctcggggtggttggctcacagaccagggtggccttcctgagcatcccgtagggccgtgggacctgaagcaaaggctacctgttgttgacgccgtgtgacagacgcctgctgctcatgcagctgcgaggctatgggttctggtcccggaggcctccgtgggttggggtcagaccctcctcccaaatctgaggtgatgctgagtgagggagtggggttgagctgctcaggcagatgcggctgctttccttatgggatgaggccccacggggcaggcccacggtcgggttcctgtcctcccaggggccaggagagcccccggcatcacaggaggatgccatgggcgggaggggacaacgggcatggggaggtctgcaggccagccgtggggtccctgctgacctggagggttctcagggatgcagagcagtgggacaggctagaggaggcgcctaggcaccccaaaccggaagtgcagctgggacaggaaggggggcggaacaggttgggggatcacaggagggtctcgctagggacagggccagagggattgagggggagggttgggccctcgggagggagtgagggtagggtgggtcctcaggagggcgaggccaggtgggggctgcatctcagggaggggcgcccgccctgggaagctgaggctttggtgggtgccggggcacattgggccaggcctgctgggatcctgtgtgcggacttggcctctcagaaggtcttcccagtggggaggggctgcacatctggccagcggcccgggggcaggttttataagttgcaattaaagctcttggccttctagttaaccgaggcagcgtagattaaagggcagttttatgcaaccaggacggatctgatgaaatcaccagccacagagattggagtggctttgactgtagatgctcattttttcccgtttgatcctccctgcatctcagaggtagctgttgacctgggtcttagaaaaaacactgtgcgttcgagcgctgagaattctagggaataaggggatattttttcaatgtggttttcctctgtgttaggaactcagtcatgggctggttggtgtagtattggctggttgatacagcgttggctggttggtgcagcgttggctacatggtgtagttttggttggttattacagtttttattggttattgtagcttggctggttggtgtagcgcgcggagcgtttccagacatcaaaccacgggtctgtgcagattctgtcttgaacagctgcgcccctccttctgtcaccctgtgcatttacactcctgtctgtaaccagtgaaatcccccacaagtgcgctcagaatttttagaaacacggcacgggctgcgtttacattttcactgtattagctttatgcgtggagtgcgtgatgtgctgtttctcacttgacatgttcagcaaatcgtgggaaacacttaaaaatccttaaaaaatactccaccccgtccaacccgtcgcccgctgcctgtcctcaggagccaccgcacctccggctcctctgagttctggcactttccaggaagccactgctgctgcccctcatctgggcagcgatgtggcctccatgagtgacctcagttaaggctctttagcaaggagtgctgtacgcgctggccctcaggccccagggcacctcactgctatctgtaaggaggctcagggcacccagcaccatgcaggaggcctgagctctgcctgctggtctgatgggaggtgaactgggtgcctgaggggggattgtggtgcgggggggggggtactgagaaccctgggggcttcaccacacaggtcccctgcaccctccccacatcccagaggagaaggtctgggctggagctcccaagggtagacagggatgcctcggggcacccacctcagcatttagggtcaccttcccctccctaccagccctccacagtggcagtgcctgcgtccctcagcctgggcattggtggtcttggctgcccccctccacagtgacagtgcctgcgtccctcagcctgggcattggtggccttggcccccctccgcagtggcagtgcctgcatccctcagcctgggcattggtggccttggctgcccttatgacaccatttctgtcggcagccacctccaagcacctgcacgagtccacctgaggggctgtagagctcctagtatctggtccatcccacgaggattctgtgcccatgggggctgcaactctggggctctgggcactgctctgcactccatggaagcccacgactgcagcctcacccattattctgattttgaaataaataaataaataactacagcctgggttttagagatgatttggttttatgccagcgtccacctggacagagcttttccctcacagcggtgcctccctgctgtgtggatgtacaaaggcctcgccgggctgggctcatggggcccctcaggctgcagcagccagtcccggaatgtcgggactgcagcccccaggagggaggcctactttttaataatcagctgttttgtttcttattaaaatgagggcaagctctcctgcctcccgctgggagctgcccaccctgccttggcaccgccctgggcggccagcaggagacctcagctctggggggcccttggctcagccacaaggggggctgggggcctgggtctcactcaacaatattcagcctcggcagcgccaccttagtgcccatgtgtgggtgggggtctggtccctctctccccacccaagttctggggtggcagctggccagcctggaaccttccaccataccctgtttggaccctggccagtgaccacggtggcaggaggcgcttgggggggtccaggtgccctcgagggtgaccctgctcagcctcctgcctgggccagactccaggaaccccagggaccccggcagggcagacagccccataggaggtcagaagagatgaggggcacatgacccctggtcaggaggaaaggatgaagccgtggggactgtgagggcagtcccagctgggcagccctggggtcctgtgtccacccacggagacaccaactcggcaccaaagtcatctccagggtcaggctctggccgtccaggtggacgggactgagctctgtgctgtatctccttgtgggctttccacggctttccagggacctggaatcagaagcagaaacacagctgcccatccctcccgcccgcctgcccgagagctgcctgctctcaggaaatgctccagggcggtgtgtgctgggccgaggggctccgcacctccaccactgcgcaaggcccctgccctgaccacaggtctgtctccttctctgtgtcctgaaggctgcagattattcatgagaaccatgtgagcttcggctcagctgaaacaccgctgggatgtgtttgaagtttttccccattttccgtaactggtctcggccggcagccctataagaggcatgttggggtcctgggcagccatgcgggcagcggctggagtcctcgtgtcaggctccagtgggcagtgctgggagcaggccccagagcaaaggggcagtgtgtctcctcttgcatttagggtaatccagcatgggggccctggccaaggggatccccagggcagcactgactgaaggggtcattccaggcagctgcatcttctacctggaaatgctttggggaacctgacaacacaggaatgtctgtgtgttttgcttcctaaaatctgaggctgagtggggcacgaagggttggtgtttctggacccagagattgagacgccccaggaggcctgaggcgagtgtcaggctccagtccagccgcccagagctcctgcccatctcccccgcctgcccactgagctatgtggccactgactgccccgttcttcctgcaggagctgcccaatggggaccccaaggaggggcctttccgggaggaccagtgtcccctacagggtgagtgcagctcccgcagccctccctccccaaactcacagacttcatcccgtaccaaggcaacgccgaaaaccacccttaaaacaaccccgtgtgcggagcgagggcacttcccaggcttagacgcactttgttcttaaaaagccttggcagcacaactcacagggtcctcgctggactggcagctgcgatctggcagcagagaccaaaaaggcctgtcccatgggcagagccctaagcgttacctttatgtgtttggagtctctgtgagcctgtgtttgtggatgggggtggctctgtataaaggggacctgtgaattttcaagttagccctgggctggaggatgtgtgagatgctggcccagcctaagtcactgccacgcgtgtatgcctcagtggcaccagtcctacctgtggcgcgtggcaggtcagcacttggcttacctgtgggtctgtgggagggtgctgggaggccagcaagcagggccaccttcggatggctgctgaagccaagagaggcacccacaccccctcagtgggaaggcaggcccagagcatcgtcccagctcaggctcgacgtgcacctgtctgcaggtgctgagcccggacagtcccacactcctatcctggggacgcagcttgcaagtgctggagaataacggaataattgtgctccagaaaccagaggactgttcatccatcctgcccagaggctgcggggagggggccgcctgttgacacactcagtgcacaggtggcctgtgtggcctgtgggctcagtgctaggattctggagtggagggccggagggactgtgtctatggggagggggcccaatgatgacacagggagcatctcctggaggcccaggctatgttcccctatctgtgctcctcggagtctgctgcacccccagctctgaggtggtggttgcagttgggggccaccgtgggctggtgagaggagggcacacccggctgtggctggccgggatagggcctccctcccctccgcaggggtcccaagatcgggctctcagctcaggcccgtctggacaggatcatggtgtggtgaggggagagcagcgagggtccccaatggcgggccacatcctccatgtgccctctgccagccccttcgcctcctcttgtccccctagtggcactccccgctgagaaagctgagggccgcgagcacccgggacaactcctcagcgcagatgacggagagagggcagcaaaccgcgagggcccgcgaggaccgggcgggcagcgcctcaacattgacgtgggtctctctccggcctcacttgcgggaacacgtccctggggccgggggctcagggacaggcatgtgttgccctaaactgggcatctgtggacacggcgtagttcactcagtcttccccacagttcaccccgtttaaggcattgaagcagaacttgaatgtgcaagccaaagtcagcaggagccagagagtgcaggatgttgctgtgaatttggccaaaactgactggtctggcatcaaataacttgagccgcattcccagccttggtgcccttggcactacaggagtaatgccaaagctgacttgacggacagcccgactctctgcccgctggaggcagggcacagggcttccgtttcccgggagggctcagggaggactggggtctccgtgtccagtcaagatttctggaattgacaacacttgacggccagtgtgtcctcttctccttctgggtgacgtggagtgcttgcatgagctgagataggtgtcactgtgggggaaccgaatcacagggcacaaagctgggtccccccaagaagggctggagctgggcaagaaggggtctgctggttcagggcttgagctccagccacgctgccctctaggctccgcctttcctagctggcatgagggacccctgggaaaggccccagaagatccttccccctgtggagttgggcgtgttggcgtgggtaggaggcgaggtcccggcccccacgtccccccacaggcactccagtgcgatgtctcggtggaggaggacgaccgccaggagtggacgttcacgctctatgactttgacaactgcgggaaggtcaccagggaggtaggtgagcttgtgtttgcgtcaggtccacagtagtagacagacggggcagacagactgtgctggcctcgcgatacctcagggggcaggaggggacctgcctgctgcgaggtcctcatgccagctgggcttgcgtctccccagggcccagttcacgtgtgtttctgggccgagcctgcgccgcccatttctgcggctgtgcttcccacactgcaaggctgccctcagggcactggaggcgctcacagggccacctgggcagacccaggctgctccgagaagatgcctgtgttggttcctgtggtctgttggtggatgcaaggatggcataggaaggggcgggggctggatgtgttttctggcagggagggcgggtggtgtcccctggggtctgctctgtcagtgaaactgatgccgggccccaggacatgtccagcctcatgcacaccatctatgaggtcgtggatgcctcggtcaaccactcctcgggcagcagcaagaccctccgtgtgaagctaaccgtcagccctgagccctccagcaagaggaaggagggtcctcctgctggccagggtgagtgaggcctgggcacacacagaggaccctacccaacattggcaggggcctaagctgtgtgcgcgggacagggagggacaagtgagtggatggaggagtgagtgggtgaatggatgggtgagtgagtgaatgagtaagtgggtgagtgagtgagagagtaagtgggtgagtaagcagattaatgaatgaatgaacaagtgagtgagttaatgaatgagtgaacaagtgagttaatgaatgaatgagttaatgaatgagtgagtgttaatgaatgagtgagttaatgagtgaacgagtgagttaatgaatgagtgaacgagtgagttaatgaatgagtgaacaagtgagtgagttaatgaatgagtgaaccagtgagttaatgaatgaatgaatgagtgagtgagttaatgaatgagtgaatgaatgagtgaatgctgaatgaaggagggagggagtgagtaatggcaggacccccctttcagaccgggagcccacccgttgcaggatggagggtgaactggcagaggagccaagggtggctgacaggaggttgtctgcacacgtcaggtgagggctggggtgccagggtggggctgtgccttaggcgggggcaccctggccacacccctgcttcccgcaggccacaggccacaggccacacaccatcctctaggtcagacctgcagggggcacctggtccagcagctctgtggggcatgggcccttccagcatctggcaccctggctgagctgggcccccaagtctgtctgagcagagggctttgaggggcagcagccacagcggccttgacaccctcagtctggacttgctgtggctcactgtggctccctgtggctccactcagcagctttgggggcaacagggctgggggtggctggggcagtggctgagggtggctggggcagtggttgggggtggctggggcaatggctaagggtggctggggtagtggctggggatggctcaggcagtggctgaggcagtggctgggggtggctgggtggctggggtgtggctggcgcagtggctacagtggtcccagagtggtgatcaggtgccactacagcatgagccactccctagagcacctgcggctctggtgcctgggagggagttcacagggttctgggggtcggctgtgaccttgtttctctggacggcacttgactgtctgtgcccaggcgtccactctccttcctgctctgcgaggaggtgggtgctggtcaggatgcaccccggacccctgccgcctgctgtaggcaccccgtcatcaggggtgcgccacccagtctgtgcgggggtcaggcccttctctgtgctccaagcaggaggcccagtactgacccccagccctgctcggagcgggggccctactgcgtggacgagaacacggagcgcagaaaccactacctggacctcgccgggattgagaactacacgtccagattcggccctggtaggtcctggaggccaccctgggcgtgaggccctggctgtgggtgcccatcgaaggtcttgattcccacagccctgagtgcagggggcccctccctgccctgccccgcccccccccaaccccccccaccccaccccacccaggacggcacccaggtccttccacagctacctgttggtcatggctgcctcctggctacctgttggtgccgcctgaaagcaaggcgggcgtcccgtccaggtgtgtgtatgtggcggatgcgggggtgcctggttcaaagtgagatggaagacattgggtttgcattcagggaaaccctgccttggggtgagaagtcagtattttagggtggaatcaccggctcagtcagcagagggggtcgtccagtagtgtggatggccggcagtgtggacaacaggcagtgtggacggcagggcaggcagtgtggacaacagacagtgtcgacagcaggcagtgtggatggcaggcaggcagtgtggatggcgggcagtgtggatggcagccaggcagtgtggacggcgggcagtgtggatggcaggcgggcagtgtggacggcgggcagtgtggacagcgagcagtgtggatggcaggcaggcagtgtggatggcgggcaatgtggatggcaggcaggcagtgtggacggcgggcagtgtggatggcagccaggcagtgtggacagcaggcagtgtggatggcaggcaagcaggtggatggcaggcagcatagatagctggcagcctgcccagcacacgtttatttccgactagcagcacccctatgtggcctgcatggagattcttgtaccaaagcccaggccactccccaagggctggggccaagtctctctcataaccccggcttcaggagtccccaggggcaggaggggtggagctggatcagggtcatgggggctcagtgcgctgtgtgctgaccctgccctccttggccgcgctctgcacaggagctgcaccctacagggctcgcactgcacgttgtgaaggtggcagtcctgagtccttctcaaatctattttgtaatgagggtttaggggatgcgaatcctgggggcgccctccctgatataacctggctttctgccacggcgccccaagcagggtctcagctgtgcgagaagagaagctccgctcccaggacacacagtggggacaaggctagaggagtcggcctttgcagggagctgtggagccaggcaggtcacccacagtggccaggccccttcccttcagggctggtggccgtctgactgcagacttggctaacagactggcctcaggtgggacccctggcgcagctcttccagtgggccctgggccgtttctgaggagatgggaacctgagcctgcactcccagggcctcacactctgacctgtgtccgcagggtcccctcctgtgcaagcaaagcaggagccccagggcagggcctcgcacctccaggcccggtcccgctcccaggagccagatacacatgccgtacaccaccgcaggtcacaggtgctggtggaacacgtcgtgccagcctcggagcctgctgcccgggccctggacacgcagccccggccgaaggggccggagaagcagttcctcaagtcccccaagggctccgggaagccgcctggggtgccagccagcagcaagtccgggaaagccttcagctactacctgccggccgtcctgccgccccaggcccctcaggacggccaccacctcccgcagcccccaccgccaccctacggccacaagcggtaccgccaaaagggcagggagggccactcgccactcaaggccccacacgctcagcctgccacagtggagcacgaggtggtgcgggacctgccgcccacgccagcaggagagggctacgcggtgccagtgatccagcggcacgagcaccaccaccaccacgagcaccaccaccaccaccaccaccaccacttccacccgtcctagcgccactgccaagcacacctcgctcccagcacaccacagcccgcgacctcagggcagggagcagagcagctgccggctgtgtgcccatggggagcccagcccccaccccccacctccgacagcaaacagcaactgactgcaggtgctggcatgatggaggtggtgcaccttggacacgtggacaaggcccaggcgccctctgctcttctgccctcgatgccacatggcggtgaacacatctgaagccactatgtttcctggctctaaggctcgtctgtgtaacccataaaacctgctttgattccaaaatgaggccctggagtgcgcaaggagtgcccggatgcttggggtgggtgttcctcccggggcttcaaggggtgactgctgtaggctgtcccagtgcgaggccgggagcgaatggaaaagctgaggctttgcctggcttgtgcatcatgaagtgagaggggacagggccggtggggggaagcagcttgtgcttagcagggagcatccgcggctccccgcaggaggccaagcagcagaaggcagcagtgctagaaagagaagtgccagagtagggagtgcagaccagtgaggaggggccacagggcacagggggagcccacaccagtgaggaggggccacagggcagcatgcggcagtggaggtagcccctggtcccggagccacagcagctcaggtgcatgcaggacacagtcaaggcggggaggggcagggcaacagatgctggggagagggagaggctcgcgctgggtgcggctcagaacacggggacttgcacattcacggtcccaacactcacggggcgacttctgtgacatgtcagctttggagaaaggtgtgtcctgcaagggtcaggagacggttgcaggccagaaggacgtcccagtgacgtttcggagtcttgcagcctgcaggggtccatgtggttacccggaacaggaaccgtgggggtgctttccgggacccagggggcccgtgccaatgtttctgagtcttggagcctgcaggggtccacgtgtttaccctgaacaggaacatgcgggtgttttccggaatctggcgaggccgcgcggcagttttgcatttacattccttgttttgtttttaaggataaagcggtgctgggtggggtctgtgggaggggtttgagccatggcggaagatccctggtgaatggcttggatgtttgtcgcctccgagtctcatgctgagacgtgatccgtggtgctgggtggggtctgtgggaggggtttgagccatggcggaagatccctggtgaatggcttggatgtttgtcgcctccgagtctcatgctgagacgtgatccgtggtgctgggtggggtctgtgggaggggtttgagccatggcggaagatccctggtgaatggcttggatgtttgttgcctccaagtctcatgctgagacgtgatccgcagtgctgggtggggtctgtgggaggggtttgagtcatgaggacagatccctggtgaatatggcttggcgcccttgccgtggtgatgagtgagctctcattcggtgtttgtgggagatctggttctttagagcaagggccacaacccccaggctgtggactgctactggtttgtggcctgttaggaacgggcctcacagcatggggtgggcggtggtgagtgagcatgagtgcctgagccccgcctcctgttagatcagaggcgggattagatcctgatgggtgctcgaaccctgttgtgaactgcgcatacgagggatctaggttgtgtgttccttatgagaatctaatgcctgatgatcggaagtggaagtttcattctgaaaccatccccacaccccgtccgtggaaaacttgtcttccacaaaaccagtccctggtggcaaaaaggttggggactgctggtttaaaggaactggcac

SEQ ID NO: 401 - DNA, 54342 bp, Homo sapiens
  source 1..54342: mol_type = genomic DNA
gttattgcagggaattggccacacgacctcgaggcctgcagttcccagggtctgcagttgcaggcaggaggcctgatggcgttgcgagtccgaaggccggtgggctccaggcccaggaagagcccacgttttcagtccaagtctgaaggcaggaaaagaccaatgtccagtgcaagcggttgggtgggaggacccctggcactcggcctattgttctccccaggcctcagcggaccgcacggggcccacccacactggggagggcggactgccttacccgggctgtggatgcaaatgcgaacctcatccagaacacctcagagacacactccgtttggcgaaatggcccggccaagctgacactaaggttcaccgtcacagcagacggttttgctgacccgtcgttggcagtggacgctcaggctgtctgtggctgtactgagtgatgccgggacagcaagtggccacgtgcgtttgtttgagtccctgttttcacttctttcggacagacccccaggagtggaatttcagggtgctgggagttttatgggcaggactccggctgggtcaccccctttgaagacaagagtcaggccactcactgcagttccacggtggcccctcctggtcctggtgcccagcgctggctggcagacgcagcccccagccatagtagaggcctcgggctcacatccctccttggagagactgggcccagggcaggcagtgctttgcaatccaaagagggatctcagactccccaccgctctggtttgaagccactggcctgccctgaaggtctggggctgggcagaggcccaggcagtggggagagaaggggcccacccttgtgtgaggctggcagctctattcaggggcagggccccaggaccaggccgcctctgcctcgctcagccagttccttaggatcacacaactttccagactctgccacgacccatgctgccctgctcataggcttcgacagctccctttgccctcctataggggccagagtcctccctgtggtctccagcccgtagaggggtcatgccactgcctcaaggccctccctatgcagccccctgcctgctgcagagctccctgaggggctgtccccaggatggctgggtgggaccttcatccctccgaggctgagaggagaagagccccgagctgccaggagggccagactcacgcatggtgtcctgggagccgtgtcaccccaggcacgagccccacctcccatagggctgcaacccccttgctgctgtgtgtccatctccctacaaagggcctggaccaggcaggctgcagacaccatggagtccctggaggcagcgtggtccccacacccccgtgggccaggactaggcagcctcaccgtcactctcccagcagaaggggccctcgactcctggctccctcagagcatagcagccctgcctccctcccagaaagggagccaaaggccagagcagaggggagtggaagccagatcaccatcagtatcatttttattgcaaatcagttaacaaaaaagatgaaaaaaatacatcatctacagttcctcatgtagatcacttttaaagtctttttctgtaaactacactctattttataaaacacagtaaaaatcaacatcttgggacgcatctggtcatgccccctggggatggcaccacgcggcccccgtagagccgggggaggctgccctgaggagtgcaggcggcacggcagcggagcgtccccagtgcatgggcggctaaggctccccgagctgagccaagtctgacgtccctcactggcatgacacacaacagactcattcattaagattttttaaacaaaatccacctttaaaaacatatttacagacattttttctgccataggctatacttggtattgcaaaaatctgctcctcccaaactaggaggggtggcccaagggcagcccccgcctccctccagcccctgcccgaccgcatgccccctgccagggctgcggggacaggaccaaaggacgcagcccacggcgttgcacagctcaatgtgcccggctctggcaagtctcctacaaaacacgggagcccacggggggtcgggtcccgcgagctggggcccaggctgtgttgctggagcatcttcttcggaacctgggggacactgtgcaggctgaggtgctggggccgccaccggggtcagcccaggcagtgtctttccccagaaaagggtaggatgcctccgtgtgtgacccaggcaagtgccacagtccacacatctcatgtttgacatgcatgatgcctacatttcaagaacgggcagggggccggggtggttctggagggaccaagaacttgtataaccaacgaacaactacataatactgaacctgaaacaaagattcatgattggtaccatgggtgcactcttggcatacacactccgagaacacattttcacaagcatgcttgcaagaaaccatctaaaacacatggcaacatctaacccatatgctttcacttgtttcctatttcagatgcaaattaatccgcgtgcggaaggtgagccagctttgcctccgtttgcctctggatgcagcttctcctaacaggcaggtgatgctggtggagcggccgggctggcttggggttgggtgggcgtcggggaaagggcgcggcctggacgccccaggagctttttggactatgctcgttcaacttcccttctccaacatcatttctttttggattttgaaaaaaggaatcaataaataaatggcatttataaatcatgaatctttgtttatattttataaacacagaagaatcttttcatcctacgtaggaaaaccctggctctcagaacttgcttgttttctcagaatagataaaagtttctacctggggccagataaaacagtacatataaataaaaaggcagtgtttctgtgtaaaataaaagtacataaataaatactaaaaaaaattaaaatcctcgttcttattttgtataaaaacatgtgttttaaaaaggctcctctggtcggccctggcatccacagagcgcacacagacgcccgaaggcttgggaaaggaagccggggtctcgtggggcgcgccgtttacttgaaggcctccggaatgcgggcgatctgggactgcatgctggtgggagggctggagacgccctcggaccagtcggagacgttggaatgcggggacgagctggaccactggtcaggggactcaggggacggggtgaggaaggggtgctcaggcacctgtagctggtggctgggggtgttgtccacaggcgaggagtagctgtgctgcgaggggggcgtcaggaactgggctgcggtcacgggtgggaccagcgaggatggcagcgacgtgggcagggcggggctctcctggggcagaatagtgtgcaccgccaggctgctggggcccagtggctgcacgtctgcctggctcggctctccactcaggaagctccggcccaggtggccgctggctgctgagctcacgccaaggtgcggctgtggtggtggtggtggcggctgcaggctttgctgctgctggatgtttgctggctgcaggttctgctgctgcatctgtaagttttgtggctgcacctgctgggtctgcaccaggtgaggctgggtggccagccgggtgctgggcaggccctggtagctcatcatctgggacagggcgctggcagcaaggctactgtgcagcgggcctaccatgccatgctgcagggagggggcctgtgtgctcagggggcctggtgccacactcccccgcagagggttgtattggttcggcaccatgccgctctgcagccgggacagccactcgcattgaccattcaaactggtggacccgcccacagtgaaattcagggcccctccgctgctggagcccaggacggtgctggtgccagaggccacaggcaggtgggagagacgaggtgggccagtctcaaaggccagccggccgcccccacccagcgccgccatctcgggcttggccgccacgttcaggtgcccgatgcccaggtgggtgtcgggcatcccaggcaggtggttgaggggcacggacggagactgctggaacggggagggcagcagtggcggcgaggccacgtctgacaggtagccatggggtgactccagggagtccacgggcgagagcatgccggagctgtccagcaggcagcccttgccgtcctgggacttcttcctccgtgccttgaggtccttggcctccttgcttccacaggccaggcctttgctgctgggcttgcggaccttcttgccctgcacgccgggcttgaggctgcccaggtagccgttgggcgagcagagcgggggcgacagggtgggcgtgccccccagcggggctccgtgcagctgcgggctgcgcaccaggttgtactcgtccagcagcctcacgatgtcgtgatgcatgcgctcctgtgcgatgtcgcgcggcaggcggtccatatgatccgtgatgtcccggttggcaaagtggtccagcagcaccttggcggtctcgtagctgccctcccgggcggccagaaacaggggtgtctcctcctgggggatgagggcgggggccggtgaggggggccaggccaggcgtggggaccctccccaaggttccatcaccagaggaagcagcagtacaacctcctccgcggggtgggggcaggcaggctgctcctcaggaccccaccccagcgtcctgcaaccacctagcctgactcttgttaaatgttaaggctttgatacatcttctgaaacccacccagagaggggatctgtgcagtcctctaccctagatcagcggggctccacctctatgggggggtcacagaccccactgaaaatctaaccaactgcaggccctcttccctgcccccaataaggcacaaaaggaaattcctggagcggttcagaggcaccggcgagggcaccagggagggagctcgtcatctggacggccatcaagccaccctggtggccaccaagctccttcctggggtctcctctgtgcggtggacacgtcacaggtctgggtgaggctgctgtgtgggagtgggaaggggcttcccaggccttgatgccctctggggcccagtctctgtggggccatgctgccacggactggggagcgcctgggccaacatgccccggtgcccaggcccgctgtgtgccctcacccaggagggagagacgcctgagcctgacatgccaagggggcagcaggagttgggggcgggggtgggggttctggcggcagggaggtgggggtgtctgcacctgtgccctgagcacccaggggaaaccaacagcagctgcagggccaggagctgcagggccaggatgagggctgggggtggctccccttggatatagtcctgagacttcttcctctgagccttgaggtccttggccttggtgaacacaccaagaggccccgccccgcagggagctgccgccacgcgtgttctggctcaatctgcaccacctgcgtcaccacattcccatccccacccccgcctggtgacagctggggacagaaggtgaggtccaggtgacggtgacacagcagtggcagcagcagcgttccccacgccaggctgtgtgccccgccatgactgccgcccaggagggtagggctgggtctgaggggcgagccgccgtgtcctgacagctggacctgcacttggaagggctccataaacgggggctgaaggaaggcaggagcactaacgaggtgcccgcatcatgcgggtggggcccacatgcgggcccagcgaccctcgagaccctgtgggtcaggcccttgtgtccctgcgccccgtgggtttggccctcacttctctgtggattcagccctcacgtctcccctggcatcccagcctcgcgctcaccctgttgttctgcatatctttgttagccccgttcttcaggagcacaactgcggcatccacattgttcacggcggcggcccagtgcagggcggacttgcctgcgtgaaagaagcagatggggtaggttggagaccagctggaggcaacccagtcccacccgtccctgtggcggtcccgccccacgacagagcagccgtgcccccgtgggctcacccaggtcatctacggcgttgacgtcggcgtgtgagttgatgaggtcctccagcatgccctccacggccaggcgggcagccaggatcagtggcgtcgtgccatcatgcatgcgggcatccaggtctgtggctcggttccggatcaggatctgggcaacagggagaggctcaggcgggtgctgggcagacgtacaccgatgcctcctgcccagaacgaacgcctggacgggaagccccactgtcttccggacacagacgagaccctcctgagatcggcacggccgggcaagacgaaacgccatggggctgcccctgaggaggggcccggatgggggcaggggctgtgctgcccacagacaggccccttggtgacagtgggatccatcgtgaccacgtgtggcctcatttaatcctcactgtggtcctagctgccatgaccacctacaaaacagagaggtcaagtccctgcccccaacggcggttacagctggcactcaggaagccgggctcacggccctacagccgtctcagaaccgccgagctagtgtccggctctgcccagagagggggtgggcagcccttgtaatgcagccgggtcttggcatctggcaggaggaatggcccctgctcactggcgggtgcaaaaggcaacttggcctgattcctgcaaagcacctgggaacttccacatctgtgcaaagaaggcagctgagagaggcacacaccaaacccgcacggggctcccttccacgctctttctgctcacctacatttatttctgcgagatgacaatgtgtcacctgagctaagaaatcaggaaatgagaagctctgtggtaactccccgggctgtgcccatctgaacctgcttgctccagggccgcctggagcctggggactcgcagcaggggtgactgcaaaggcagcccctgccagggacactccctggagacccaggcatccaaatccctaaatccattcttgccacgagctcaccggcaagctgagccctaggtctgcaggcaccgagcggcagcctctaaaccctgcttctcactgccacaggctacgccggcagccaaggttgagggaggggcggggctgcgaggggctgcagcagtggaacctggaccttgagcaaggcccacaaccctgatggagcctgttttgctgggggtggggaggtgctgcctcactcagcagatcccccaggcctcctgccagacccgcctctgcctgacttccctggagaacacagatgggcccgacgccctccccctcgcacctcgctgactgcgaaggtcccaggtggaggcaccagttgtcccggactcagctgtgctcggggtcaggctcccagggccacgtaagcctggccactgccccagaccaccaggcggccctgaggagggcaggtgggcacacaggcagccactgcctacctggaagacaccttgtgcgtcggcagacacagccgcatgcagcggggtgcggcccatgttgtcctggatgttggcatctgcgctggcctccagcaggcgcttggcggcatcagagcgtgagtagcgggcggccaggtgcaaggcggtctcgcccgtgcggtctgtctggttgtgcaggctggcgccctggtagatgaagtcggagatgacggccggcgcgtcctcctcttcctcgctgttgcccgtctccaggccgcccccgctgcaggaggcgatcatgagcggggtgaagccatctgcagaggcagagacgggtgctcagtctggagggccggtccccagctgcagcccagggggaggggggcagcagccccaagctcaaggggccacggtgtggatgcaccacccagcacttggtggccccgtgcacacagccaccaaggggcagctgaagtccgcctgggctgctcagtggacagagccgaatccagcttaaactcctggcgggcaactgcttcctgacctgcccaagacctggcacccaaaatccacccaggaaaaagaggaccccagaagcatgcagttagaaaattaatgcttcagcaggatgcggaggctcacgctgtcatcctagcactgggggaggccgaggtgggcggatcacctgaggtcaggagttcgagaccagcctggccaacatggtgaaaccccatcgctgctaaaaatacaaaaattagccaggtgtggtggcaggcgcctgtagtcccagctactggggaggctgaggcaggagaattgcttgaacccgagaggtggaggttgcagggagccgagatcgtgccactgcactccagcctgggtgacggagcgagactccatctcaaaaacaaaaaaaaaagaaaaaaaaaaagaaaaagaaaatcaacgctttccatgtctcaagaaggtttcagaaaagagtaatttacagggacagagtggccctgcggtatcaccccaggaaggggttggtggaagaacaggaggactccaggacccccccacgtctactctgaatgggaaacaccccaaggatgaaagctctcacccccaattctaagtttccagagtatcaactgtaccccagcctcggggcttaggggagagaggcaggtgggccacggggctagggaagccctggctgctggcacccttaccaggcccgcggacattgacgtccatgcagtcggcgtcaacctcaccctggggcggtgtgggggccatggcagacatgcgcaggtcagcggcatccaggtgctgctgagtccactgccggtggtctgtctggtcgtccaggtcaggcagaaccacgggctcctcgaactacatagagggagtgagcagagcctgtcagggcagcccggcagcaggtgcccgggagcccaggagcccgggagcctcgcgactcacccggaacttcttggtctccaggtcctcgtccccccactcattctggttgtcgtccatgagggcaccgtctgaagcgttcttcaggggcctggggggtgaggggtcgagaagtgaggctgagcgagctccctaggaagcccccagagacccctggcccgggcctggcgtgggaggtgggccctgggtcgggaggggcagactcccggtgaggatgctcggccaggtcccacctcccaccggggacccagaagcaggggcggcgtccgctcacttgaggcccacggagtcctcgccgaggggctcccgccgcttcttcttgctggcctcagacactttgaagccctcagggaaccagagctggccatgctgccgccggcgcttgcgggacagcagcaccccgcagcccacgaagaacagaagcacaaaggcggccgccgccacgtacatgaagtgcagctgcgccggcgggggcggctccacggtctcacctgcgggcacgggggccaggggcaggtgcccggacatcaggcagcggctacgcagcaggctggtggccggggggcggcggactggctccgcgtccgggcgcctcctcacccactctcctccatcccgccctccaaaataaggtcattttctacgcgattaatcagaattgcaaactatcgctaaattctctcctgcaccagccgactctatctggagacggcttttacttttttctcctttaaggaaggaggattagtcaacttcaaatcgctgcactcgcactgagctgttaagacaaaggatttagagggattttcaagatacaaacttcaacacttcacatgacaccgatcaattcttctctctctctctttttttttctttaaaaaaagccgtaatgattttgaaataatacccaacaaagaaaattcaggaggaaagggtggggagagaagcaggcacccactttcccgtggctggactcgttcccaggtggctccaccggcagctgtgaccgccgcaggtgggggcggagtgccattcagaaaattccagaaaagccctaccccaactcggacggcaacgctcacacccgtgggtagcaactggcacaaacagccagcgtgtctggggcacggggggatggcaccccctgcaggcagagcctgttcccgggatggggccacacttactctgcacggcctcgatcttgtaggggatgttgaggctgcccagcgaggcgagcgctcccaggaatgcggccacgtcggtggcactctggaagcactgcgaggaggcctgcacacactgccggttgtcaatctccaggtagacgatggagctgggcggacaatcagagaggggctgggacccgaggcttcctcctcccccgcccaccggccagggatgctgccgcaggacactgaggcccatgacgccacagtcaggacatggtgaggcagcctggggtggtgggaagccaggtctgacagcagctaccctgcaggggactggtgccagccccccgactccggccagtgctgatcacggctcatcccagatacccaccaacgcgctctccctggcccgccctgacaccctctctggctcctgctggtgccacagacacgtttcctcatctcaggacagagtatgtgccaggagcccagtcctcccccaggagccatccccaggccctgcaggaagcacaggcgtgaggtgggggtgggtgcagcggtggtgggctgtgtggtgaggctggctgggggtgagctctgctccccaggactgggttcccgtgagcaggatcccatccagcctgtgagatgatgcttctgacctccaggattgctccaagccagcagaactgacaggcaaacccaccagggtcaggcacacgaagggcacaaccaacctggctcctgggtccagctgccccagatcgagtaggcatgggcgggagccttgtggggtgccccctgcactcaagctgctcctgcctgtgttctcccaccgtgggaccccccacccccaccagctcctcctccaactgcaaggcccagcaatgccccctcccaggacctccacctgcctcctctccagcccaagccaggcagacgccatgaccaagcggcattcttgtctggggtggggctgttcagccctgtgggaacccctggagagctgagtgttttgttttttacttcttttaatacttttttaaaaaaaacagagacaaggtctccctatgttgcccagactggtctcgaactcctgggctcaagggctccgcctgcctcagcctcccaaagtgctgggattacaggtgtgagcctcctcgcctggcagagggctgagttttaatcagtgtagtatccagtgcctaaggcacagctcaatctcaaaatcacctactgggcacaggagtgccgcctgtccaggggaaggcagtggcccaggaaaagggtgtggctgtggggtcagggccctgagctggaatgctgcctctactccttgcctgcgcaggccctgaagtcccaggtcctctcggaacctccgtctcttttaccataaagtggggagagtactgcttgccatggcgccggccgtgaggggcagggaggccgtcggggagggcccaggagagttgcggggattgaccgtgggcgccgggtctcactcacccgcggacgtccatggggtccagctccctccgccgccgcccaccctcgctgccaccagggagcagcgaggccttcacctggcccagcagggcgtcaggtgcggcccagccctcggcggcacgcttgatggggtgcttgcgcagctcctcctcgcggccgtagtaggggaagatcatctgctggccgtgtgcgtcacgcttgaagaccacgttggtgtgcagcacgcggctgagctcccgcaggaagtggaaggagctgttgcgcagctgctccggcggcatcagcaccaccaccaccagcgtgccggccgccagcctctcgggtacatgctccgcacagtccagcccgtcccactcgcactccgcgctgttgcagccctggtcgcagtgcccgtcgctgaagtggtccttgcagtactggtcgtacagggggctgtggggggcgggacacgctcaggccgccttcctcggggggcctcgcacccgccgtccggtgcctccagcccactggccagccgcgggggacgtccctgcaccccctgagcagagccttagaactgcatgctggcctccgggcccaagccaggccacatccaagttcaggtcctccctcagccccatgagccccgcagccttacttgcactggccttccgcacgctggcagtcaaagccgtcgaagaggcagccggctgagttgcactggctgtcacagtggccgtcactgaagtacttccagcactgcagagactgcgtgcagttcttccaggggtcattgaagttgagggagcagtcaccgccgtcccagccgcacgcgtggttgttgcactgcaggctgcagaccttgttgcccgcgtcctcctggcactcgggcagctcgcacgcctcctcgatcagcggcggggggatgtcgcgcccggccccacccccgaagctgtagtccaggatgtggcacaagagcccgttgaatttggcggggcacaggcaacggtagaaggggctctcggatgtgggctcacaggtcccctggttgtagcaggggttgccgcccaggcaggggctgctggccgggaactggcattcggggcccgtgaaggggcccaggcacaggcaggtggggctgcgcgggccggagatgcatgtgccgccgttgaggcagcgcaggctgccgcaggtacgagcgtcattctcacacgtggcgccctcgaagccctgcccgagagggaagacaggacggtgtcggggtgggccaccccccgcccccccgccacctcacacccagccctcggccagcagtgccaccgctctcctctaacctgggaggcggcctgcaaccttgcccccagcagcaaaaccctttacacacattctaccaacagagaaagatcgggggtgccagggggtcgggagatggaggaaggggtaaactggtggagtgctgaggactttagggcagggactctctgccgtgatcctgcgagggtgggcaggcatgtcatacctcagcccaaacccacaaccacaaagccaagggcaagccccaggtacaggaagggctgctgttggtaacaatgtatcactgaaatccagagtgaaattgatgcaagctgctaaccaggggaactgcgtgcaggggacagccaccccagggagtctacttcctgctccatttttctataaatctaaaatgtctctaaaatcatttattgaaactaaaaaaaaaaaaaagacatcagggtgaggaggaggatgaaggccgggaggatcactgcccggtctgcgccccgaggcccccacgtggacctctccaggtgtctcccctggcgggcccctgcctccctgcacccctgcacctaccgcagggcacttgcagatgaacccgcgggcggtgttggaggccacggcgcaggtgcccccattcttgcagggcttgcctttgcagccattgatgacggactcgcagcggcgccctaggggtaagagcagggcagtgagaggctcaccctgctgccccacacgccccacccgcctgggcgcggcacccaccggtgtgaccagcacggcactcgcagtggaagtcattgacgcgctgcacgcagttctgggtgccacgggcgtcgcagggattggacaggcactcgttgacatccccctcacagcgctcacccacgaagcccggcgggcaggtgcagctgtagccgcccacctggtccacgcaggtgccgttgttaaagcacttggggctccgggacacggggtcaacggggggattgcagtcgtccacgttgatctcacagtgcacacctgcggggccaggtttcgtcagtggcccaagcccgccacaccccggccctgccgtgccgcgtgtccgtcccggaagacgagcgctcaggtctggggctgcacggacactcgggagaggcaggtgtcaagggtgccgtggagacgcccttcccactgggacccccgctctgggccctttccctgggcagctgtgagtcggccttggcctcacacaggaaaatgggagtttctggctggttcctggatgcctctggccggtcccggggtgcctgccctgcccctgccctggccatggatggccaacaccagccctccgtgcagcggcccttaccctgagtgccccgtgggcaggagcacttgtaggtgttggggaggtcgaggcaggtgcccccgttctggcaggggtgggagaggcactcgtcgatctcctcagagcagttcaccccgtggtagccggccacgcactgtgcaggcgacagaacgaggggcccttcggctcagccggcgccaggatgcagtgctcccacaccccactgtgagggctgacagggccacatgagctgccctcaggtccagcgaagccacgggcccctcgctcctgtcagacctggagagagacccagcccaacagaccctggcggggcctcggtgaccggagtcactgcctgttgggggtgggtggaccccgtcccataggatagaggtgagggcctcagggtaggtgttggccaagcccagacacaatctaggggaagggaaaaccccatcccacttctcagtataggtaccctccttcaggctttccacaggccacctcttccaggcagtctaccctgattaccccagccctcccctaatgagactgaacagtgcatgggcctatcaggttcagttttctccactgggccagctcccagccagggcctggtgtgtggcaacactcgtgccggccacaacccttaccctaggagggacccccaccttgcaggagtagccgcccaggtagtccgtgcaggtggccccgttctggcaggggctgggtgagcactcgtccaccaggtcctcacagtagctgcctgtgtagcccgcctggcagcggcagtggtgcgtgttgcccgcgtccacacagagccctccatgctggcacaggcgggcaacgtcaacacctgcgggggatggggtggtagacaggtgaggcccaggcccacagaggaccttgatgggctgggacccgagctgggtgggcacagcaggttaccttgtcgctgcgcagccacctcacaggacacgctgggcacgtcgcagtaaaggccggtccagccgctggggcactcgcagcggtactgggtgtgggtctgccagcatttgccgccgttcttgcagggcgaggagtcacaccagtgcacaaggttctggggacagattggggtcagctgggtgcccgcgccccggccatttccccggtagctcagaacgcacatctgccaaggggcctactccaacccaggctgcaacccattctacagaagtggaaactgccgcccctggactccccaccacccccacaccaggaacagcctgggctgggtctccctcagggccctcagcaggtccagaccaccctcggcctttgctagaaggaacacttttcctcaattccccaattcctgagctcctgccccggctccagaaacctgggattgaaacgaaggtgcctgctgcttccgcatcaggttccttcaccggctgctcagatccccagaaaccctctgcccgggggtgtgggggtgaccccgagccgacacagtgggacctggggtgaccgttcccacctcccgcaggtaggcacccacccagggcccctccttcgggcacctctgtggccggcgcactcacctggcagttggggccagtgtagccctgggggcaggtgcacctgtaggagccgcagccgtcctgacaggtgccgccatgcaggcagggctgtgagtcgcactcattgacatcgtgctggcagtagctgcccgtgaagccgggtggacacaggcaggtgaacgagttgatgccgtccacgcaggtgccaccgttgaagcaggagctgcaagggggtgggcaggcgggggctgagtggagggcattggtgggtccccgctccagcagattctgcctcgccagcacctccccttctgctcaaccctaggggcctgatggccaggacaggcccagggcagcctggctgacccagggaggccagtgggaacccggggcccggctctcacaccacgtcacacctccctcccctgctttctttataagtcaggtcgagagtggttttaccaaacgcgtgggcatagggtggttaaagtaaatgagggagaaaccagaaaccgtcctggtaacacgggaggtaattacgtcagaaaccagggacgagactgacgtttaccaaatgagcttcctggcaaacacggcaaaaaggaaacaagaacggacagagttctcgttgtctaatagaaggaagcgcaccagttcttcaggacagactaccggcgctcctggtgcgggacacaggaggaggtcacaatggccctctcaggagggacaggtcggtacaatgaacaatgtctggactcaatgcagccagcgctaagtgcccagccggcctaggcggacgcctgcatggtgtgccaggctgccagctactgcgtgtggcccgcaccgcccgttcccttccacggcctcactcgagccccgcacacctctctgtgcagtcaggcgtgttgttctcacagtggatcccgctgaagcctgcggggcaggtgcacgtgtagctgtccacgcagtccgtgcagttggccccgttgcggcaggggtcactggcacactcgttgatgtcctcctcacagaaagtgccccggaagccgggcaggcagtcgcagaaggccgtgttgatgccgtctgtgcaggagcccccgttgtgacacgggtctgggagaggacggaagggtgagtgtgaggggcaggcacaaacccacacctgcgggagggggccgggaaggctgcatggctggggacagcccagcctttcgttgccgaggctgcggcaagcagccctgtgacaaaggtgtctggtggggagccccagcacccacaggctgcgtcacacccgtctcctgtgcttggggtctctctccccacctgctcctgtcctcaagctccagggcagggggcagctttgcaggcttcacagaccgagcaggggaggagagacagttcttgcctctgcctgccaggtgatgccagcaagacccccggcttctgccaacctcaacctctgtgaagcagggctgggaggcctgagagccctggcctgcagcggggcccgatgagccaggcgggagtgcaggccgggcccgagccatcctcggctcagtgaagagccgtgggaggggctctcgtgactcttccgcgaagtgcagggaggagcaagccggctctggggccctcctgaaccaccctggccatccctcagcacatcccccacacctgacccaaccctccccggccacactccggcctccctgggtgcttatggccagcaccatgcgcaccaaccctgcccgggggaactgaggcctgagagcttcctggaggaggccagagccgcggggctactcactgggccggcagtcgtcgatgtcggtctcgcagttgcgcccactgtagccggcctggcagtggcagcggtagccgccgtgggtgttctggcaggatgcgccgtgccggcacgggctcagaacgcactcgttgatgtcgacctcacaggtctgccctgcggggcaggaggaggccggttggtcaccagcggcccctggccctccaggcccttcccaggctggcccacccacctacagtgcctctcccgacccaggagtaggcttccgtgaccccaggaccatcccctctcccctaattttggcctaagaaggtcacaggaactggagttgggaacggtgctcccaggtcaattcctgattccagaacttctccgaccagggcctcctcagcacccaccagctcctcttcaaagactcatctagcctgcctgggagctgcctgtgtcccgcagacatcctgacctcccatcccagccctcaccgggccctggccagcctcaccttgccagcccgtggggcagacacaggagaagctctcatagtcctcggattgcctgcactccccgccgtttctgcaggggctgggggcacacggggccagcaccacctcacacgtggcacctgcgggaaggagacacacgtgaccccgggagcctcacccagagggatctcccaaatcggccaccgcctgctggtctttccgccatcagagtgccgtctgctggtcccgccgggaggcaaatgtgcaccgagacccctgagcgctcccggctgtgccaggaccctgacccagggaggagtggagcacagatggggggacgctgaagacaagctgcacaaatgtcacgctcagaagccacccctcattcccggttggcagcggggcacagcctaggcctcaccccaccaggcgtgcccaggaacaaggactgcaccaggagaggcggcctcagtcgggtgggctccacgacactgcagggacctgggcccaccccggacgcaagccccctcatctctgggtgacgaggaaaggccctggcctgagaccgaggcctgaaactaatcctggggctccgtgtcacaggcagcaaacgcccatcacgggaggccaacaaacaagggctgcgatggaggggacaggcccaggcccccagcacatcctgcgtgtcggggcacggggcacggcctggagacctccagggccacgcagggtgtctggcaaaggctatgtgggaaccacgtgcacagccgagggcctttttctgcacaagcccatggccgagcttcctgtttatagccgtggggactgcgttatcttccctgtcccccattatctccctggcctgctggggcgactttccagggcctctcttcctattggtttccacggtgacccgggcaggcaggaactgcgccagagtttccgacaattgtgcgaaaggaagcaggaagcgggcagataggaagcgggtcagcaccgccgctcctcctgccggcccgatcgacgtgtctgaaagggacaggggcgcccagccgtggagggagggtcctcactgactgacacaggagagaaaacccaggtccttaacttcggtcaaagaaaacagcgttctggccacaggctgctggatgtcatgggaaccgcaggcgtgggacctccagcccggctgcctggcccaggcaggccctccctgaccaggccccgtggcagcaccctctgcccgctcctggggagcgccaggaccccggtgcttgtggactcttctttgtcttttctagaggagatcatttcctgtgatccccttggctgggttcatagcaggggctggacagttgggggaacatccccctccccgctcagcccaaacagagggctccttgttccgctcacacaaagagagcccgccatcaaaggaatccctcaggtccggctggcgggggtggggaagcccggcccccagagaccccagcagggtgggcgccgggagcacggagcccagtgacccaggcccggccctgctaaggattcacctgcatcttacctgtgtcttgcggcaggcttgccaggtaaaacacatgcttgcatgaaaattttctcccaggcatcctgtatctttgctaatctgccaaccccacccccgggagaaggcccacatactgcaggggcctaaggcactcagtgaggcgcagaaccttctggaaggccccgccccaagaaagccaccactttaccctccagtcacggcttcccaggccgcccccacccctggccccaccctctccagcacaggctccgccctctccagcacaggtcccgcccctcccacataggccccgccccctccagcacaggccccacccacccctcacctgtgtagggcagcaggcagttgcacttgtacccggcaacgtcgtcaatacacgtgccctggttcagacatgggttggacgcacactcgttgatgttggtctggcagttgggacctggagggaaggggacagcactcggcatgtccagcactcccaggcaccttggcagggccccacaacagcagccctgggcctgctccccaccccaggcccctcctcatctccaagagccagaggcctggagctaaggctttgccacgggagggagacaccatgcatggtgctggctggacctgggtcccgatcctgtgtctccagctccccagactcgagggcggccctctgcactgagaaacgcgcagcccactcaccgctgaagccctcccggcaggtgcacacgtagccactggtcatgtctttgcaggtgccgccgttgacacaagggttggattcacactcattgttgttgatgtcacagttggtcccactccacccagggtcacagtcgcacttgtacctgcaagggggaccacactgcaggtcgagggaggcccgagcagcacggccggggcctgggcactcccgggtctgcaatgccctatgggctggcggaggtgcccatccactcagactcgcagagtcctttagtgggggcaggctgggcgctgtggctcacacctgtaatcccagcactttgggaggcgggggtggctgagtcacttgaggccaggagttcaagatcagcctggccaacatggcgaaactcccccaccccatatatactaaaaatacaaaaattagccaggtgtggtggcacatgcctgtaatctcagctactcgggaggctgaggcaggggaatcacttgaacctgaggggtggaggttgcagtgagctgagatcatgccattgcactccagcctggacaacagagcaaggctctgtctcaaaataaagaaaaaagtgggggccgcagcgcttcccatacccaagactgcggcaggggtttggttcattagcgaggggaccatgccaagtgcagggcagtagggtgctgcgaaaagccccccaccacttgcccgctgtgtggccccgaacaaagcacgtgccttctctgcgccaaatgagggcaatggggtccctgctgatttaaatggtcccatccaggcagagtgctgccaggcacatcatgggcatcagaaacacttgcggctgttaccatggaaacgtgttccagggtcactgtgggcctgtgtcctgagcacaccatgcagcccacaaggacacgcagcacacagctgctgggtgtggactgtagtctgactgaggacccagaggcatgtgcgtccccgaggggagctccctgccacccagccccgtccgaggcccgtttctggcccatctcaagctctgtgcaggtgccaccctcctggcagcagagctcccagggtttaggactgatgtgtccccatgatcggccccgccgcatacccgttgaggctgtcccggcaggccccgtggacgcaggggttgctgttgcactcattgacctcagacaggcaggtggggtcgtggtagccctcggggcagcggcaggtgaagccattgatgccgtcctcgcaggtgcccccgttgtggcaggggttgcccgcacactcatcgatgttgatgttacacatgctccctaagggcagggcgggtcagactccgaggcccagcgcccagggggtcccacccacgtcaacctcgatttccctgtctgttgagccggggcgatcacccttctggccacatccttccaggtgtcagaaaccatcttggatcacaatgtgccatgtgccagcctccccgggcaccagtgcccactcaagtcatcctcccaggggccccaggggcaggggctactgcagccctgactgatgagaatctgaggcccagagaggcagagggacctgctcaaaggtgctggtgagccacagaggcagaaggtacttaagcctggcctcagggctggctgctccctcttggcctgctgggccactctgccaacacggcctgggacagctctgaccggagacaagaggggtcggggggacccatcgtgctgccagttatagccctggtcccgctgcaatctctgctgcagaccacggtctgcccaggtgggcagcaccaaagccctcacccaacccctcagcagccccagggcagagtggctgaccttgacctctgagcacagtgcagtcagcccccacgtgcagggccgctcacctgtgtagcccggctcacaggcacactcgtagccatcgatcttgtccagacaggtgcccgagtcgcaggggctgctggcacagtcatccaggttgatctcgcagttgggtcctgaaggggtggcacgtgtcggtcagtcctcaggcccgccctgcccactggccccccgccggccacccgcctggccggccacctgtggtccccttcaggcagaagcagaggtaggcgttgtcgcggtcctggcaggtgcccccgtggcggcagggctggctggagcactcgttgatgttggtctcgcagtggtggcccgtgtagcctgggcggcagaggcaggtgaaggtggcgacgccgtccttgcaggagccgtagtggcaggggtcggggtcgcactcatcgatgtccacctcgcagtgcgtccccgtgtaccctggaccgtgggaggggcgggcacaggaagacttaggactggcggcccccgggacacccatgaccagacctggggtcacctgtgccaacctgaggagggctccgagcgtggcattcccacctactcaggattggggctgagctgtgctctcggcctctggaccaggtggcccagaccaaggtgtccatgaccttgtcagtttcactgccctgagtgccctgtcccgtccccagtccctccccgctggtgggcgccagcccgcaccttccgtgcacacacaggtgtaagtgttgggtccgtccaggcacttggcaccattcttgcagggggtgctggcacactcgtccacatcgtactggcacagatgcccagtgaagcctggggccggggaggggaggggagggagtcatgtgcaacagcactatggcccttcagggacccctggccagaccccagcagtgagcgcctggctgggctccccagggcacactcagcctgagctcagccagctccagctctccctgcctcccgctgcccgctccccggatcaaagcccctcccccagcaccacacgccctcgctcccacagaaggggcctttttcccaaaccgactgggttgctatggctacagtggagccgggctgagaatggggctcccctcgctccagtgtctgggacgggtaatctatgtcttgggagcctaggcttgggctggcaacgcctccctgggctctgcgccccggcccccagctctgggacagatggaaacacctttcacccaggcccctgagagttcctccaagtccgccccgggcagccatcatctccattgcaggccaacctgccccacgtggttctctgcatacccttgtcgctggcgtgccgttgggcaggggacatggcaggacagggcaggctggcctccctcccagcatcgagccctcagaaagccaggctggagcctcctccctgtctgggcactgcagctcctggtatacccttctctccaggcagaaggggctgcacccagatcaaggaggatctcctggccctgggctccaccgcgacccctgggcaagctcccactccccactgggccctgcccttccttcggggaagtctgaaaacactcccatccactcatgaggcaaaaccctcgctctcctgggaatctgaacacaaccaatggccaggcccccctcagaaggccggggtgcagacggcccaggggcaggggacacaacctacggccaggcacccctcaggaggccggggtgcagacggcccaggggcaggggacacaatccacggccaggcccccctcaggaggccggggtgcagacggcccaggagcaggggacacaacccacggccctcacccctcaggaggccggggtgcggacggcccgagggcagggggtgggggcggccctcacccctcaggaggccggggtgcagatggcccgggggcaggggacacaacccacgcccaggcacccctcaggaggccagggtgcagacgacccgggggcagggggcgggggtggccctcacccgtggggcactcgcactggaactcattgatcttgtccaggcagcggccattgtgcaggcaggggctgctggcacactcgtctgtgttgacctcgcagtgcacaccctcgtagcctgtggggtggggcaacagtgaggggggcacgcgcggccccagtgccccactgggcacagctgtggacttgggacagaaacgaaccctgcctccagcccagtgtcccagccaccacgggccccctgcgcacccgctcccctgcagcccgtggcccctggcccggcaccctcatctgcctagcactgcccccgtgctctgctggccctgtggcctggcctcagtttccccatgccctgtgcaggctgtgggcccagaaggcatggaggctggggaaagcggaagcaacccacagatgttcccggggctgcccctccaaggctgcccagcctcgactcggtttcccgccctggccccggccgacgcaccgggcatgcagatgcactggaactccccaatctggtccaggcaggtggcgtcgttctggcacgggttcgagacgcactcgttgacgtcgatctcgcatcgggggcccgtgtagccctgcagacactggcactcgaaggagcccagcgtgttgatgcacttgcccgcatgctcgcaggggttggcacctggcgagggcacacgggtgagaggctgctccaggcaccctggcccctgcaacacctcactgcacaccacccccatcggactggcagggtcccatcccccatctaactgggcaccccctgaagccagaatcgacttctcatcggttctggggccaggctgccacccccacctggccgcaccccctgtgctggcacctacccagcgagcactcatccacgtcctggctgcaggccgggcccgtgtaccccgaggggcaggtgcagatggccttgccattgacagggttggtgtcgcagttggagccctcgttacaggggttgctgatgcatgcgtcgttgaggtggcacagcagacctgggcaggcagcggcggtcagtgggcacggcccctgggccaggcatggcacaccacccacggctggggtccaaccccactgacaccccaggaggagctgcccgccgtgaccccgtcgggcatcccgtgacacttgggacgttccgggggactcacagcgaccaccggcctccctgaccagaaaggccctttcaggttatcctgggtgcaggagggccacagtccctgggtgaggtcacacagctcaggcctggcccatgtgagccccctgcgcccacctgggcctcaaggcactcacctgtgcggccatggggacactcgcagtagaaggaggccacacggtcatggcaggtggcgccgtggaagcaggcggcgctggcacagtcatcaatgttctcgctgcagtcctcaccagtccagccgttgacacacacgcagttgtagccaccgtgggtgttgtggcaggtcccgccgttctggcaggcatttggcatcagctggcactcgtccacatcctcggtacagtactgacctgcagggaacaggagctgtcggccccgggcagctgccactccctgagctccctgtcccctaagacgcagggtggcaatgccgccccctccaggaagccttcctgggctgactcctccacccaccgccagcctaaatcactccttcctctgcaggcccagcaccatggagtcttgcctcctctttgtgctctgtggacactgctgcgtcggggtgcacctttgcccgtcaccccaccagagggtaattcccgaacacagggcctgtctgttcatccaggcatccctgtgactggcccaggaagcgtggcctgagtggggtgctgaaggccctcaatgccaggacaccccactgggcacaggggctgcctggagccaggttgcaaacggcccacacagaccaaccagggccctgtctgtgctgacccccgaggtgaggggcaccagaccctggccacgggaagtggggcccccatcatgttgtccttctcggccaaccctagtctgcctggcctgggacagggtctcggctgctccccgctatgcctgtgagtgcagtttagtaagtgggtagcagccccgccccggctaccccgccctgcggcgacccgtatacgcgcctgtccactctggcgggcagcggcagttgtaggtgttcacgccgtccacacaggcacccccgttcttgcagttgtttcctggacaatcgtcgatattttcctcacagttctggccggtgaagcctgccgcaagaggggccgggtcagcctcttccctgaggtccagtccggctcctgcctggacccccgacacactgctctggacacaagagcctggcctccacggccctgccctggggcccccggggtctgtgcccgtcccctgcctcactccagtgcccagagggacacgccctgcttgaaagaatcattttggacaggactggctaaacagggactcaggaacacagggttccagaagattctgtcacaaaaacccttgggtctcttttaagaggttccggcagctcctgcacctgggtgccgcctgcatgctcagagctccctacaatgtctccacaggggggccgcacaccccatcttcaggggctgacactggggcctgggctctgagcagcagggggacatggggccagcaggctgctggctggggcagggtgggcccctcgcagccccagggaagctgcagagattcagatggcccatcctccctggggcagagctctggtgcccacctcctcctccccctcctcctccacaggctgccagggccccctcccccgaggtatggccccacccaggcctccaaggcagccagttagctattaatccactcaactcccgctggttcaatgatcaacccagaaaggcgcgttcggcaacagccaaacctgcagccggttactaattgccgccctcccgagatgcctttgaacccccgttgcccttggagctcccacctgctcggcccctccctctgagacattgccccaccgccaccaccccgtccgttctgtctgtctgctggaccggagcaaaagcaggcagccagagacaaccaaaatccaaaatgcaaatcagcttggggagcacccaaaaccagaccccagccctggcgcggtggctcacgcctggaatcccggcactttgggaggctgaagtgggtggatcgcttgcgcccaggagttcaagaccagcctggacaacatggcgaaaccccgtctctacaaaaaaaaatacaagaagtagcaaagcgtggtggcgccggcctgtggtcccaagctacttgaggggctgaggcagaaggatcgctttagcctgggaggtcaaggctgcagtgagctgagggcacgtcactgtactccagcctgagtgacagagacctgtctcaaaaaaaaaaaaaaaattcagagcctggagcctgagtcccggtcccactcatgtgtggggccctgcaccccggctccgaggcagatggggcccctggctgggcctgcgaccccagggctgccctgcaaagcactggctgaggcacacagtgggggagagggcgggaagccagcgagagccccgtggaccccagctggaccctctgcgacgtagcctcggccagcgaccccacgaggagacagtgctgacgtgccaggcaggctgtgcgaccccaaatcccagccagttcccgggcctgcagagctcagggccgcccccatctcggttccccgtgactccacacacagctgtctcctgggctcctgaccacccagaggtggctgagggcccttcagggggcctgggtgcaggggccgccggggacagtctgaagctggggtctggcaggcctgagtcatttggggaggcccccggatggtcatctcaccctgaaacggccagactccacagcaggcagtgagcacacccctcaccggacgggtgacccagcccccagcaccccagcctctgagatctacccacactcaagtgagtgaaccccaccagcccctccccttccctccctgcccactccccagggccctgagctgcccctgcacgggcagtggctctgagccggcccagcacccctggcatctctgccgctgggcctcaccaggaggtcctcacccaccctgcccaaggcgggtgggcatcagctctgcacacaggtggccttggacaaggccgcacacaccccacctgccctagcctgaaccacggccccccaagagcttggcccctcaatccgtgtgactggaggtagggtcccgtgctgctaggaaggcatctgagcccccaccagcagaagggctctgcgccccaccctgcagagatccaagctggccagggagtgtctgtccccaccccacgctcgcccagtgacttgcaggaaacgcacacgtctggtgtctgcacgcagaggtggctgggctcagctgactgggcagccagggagcttcccctttgcaggggccaggccagcttggggcttccaagggggtggggcagcccttgggccacccgtgggtcagccaggaccctgtgcaccctccagccccacccctgcctgaatgccctctccccattcccacctaacagccattctgtgcagctgagattggaggttttcttttttctcttcacttttttttttttttttttgagacggagtctcgctctgtcgcccaggctggagtgcagtggcgggatctcggctcactgcaacctccgcctcccgggttcaagtgattctcctccctcagcctcctgagtagctgggactacaggcgcgtgccaccatgcctggctaattttttgtatttttagtagagacggggtttcgccgtgttagccaggatggtctccatctcctgaccttgtgatctgcccacctcggcctcccaaagtgctgggagtacaggcgtgagccaccacgcgcggccgagactggaggttttcaaaactcttccttatttttagagctgctgcaaaatttactcaaacaagaactacagcagagaggctcctacgtacaacacggggatcggggagcactggggacacgggcaggcggctgcgcctacctgtcacccacacccgcaggagaccagcaggatggcaggaagggccatggcttgggaagtgatggtgcccccgcagctcccacgccctctccggccccagccccactgcaggggaaaccctgggggttgcgcaagtcagggtgcctgcactggggggaggcagggcgtcctacagctcgaatgtgagttccgggaaactccagagacacgggctggcacctggaccctgtgcaagcctcctcccagcgcacaccccgctccagacgcgtccccccgacaccacacgcagtctggggaactcgccatcccgccttcccaactccccgccatgggccctcccagggctgcccctacaccaggcgccccgttcccaccccctgggcctggcagccggggaggggctcgtgcaccccggccagcgggcagcactacctggcaggcaggcacactcgtgggtgacgtcgcccgtggggcggcaggtgcccccgttctggcagggcgaggggctgcagggcacgtagggccgctcgcagttggggccagtgtgggtggcgcggcagacgcagcggtaggagccgacctcgttgtggcaggtgcctccgtggcggcaaagcccgggcttctggccacactcgttgacatcctgccggcaggtggggccatggaagctgggtgggcagtggcagatgtaggaggcctcgaagggcaggcactggccaccgttggcgcaggggttggaggcgcacgggtcagcctgctggcacgatttccctggagacaaggggacaagagggtcgtgctggcctcactgctccccgaggccgggccttccctcccttcaggccacctggaggtgccagcctgggctccaccttaggtgctatcacatttgatcctcaggacctgccgtgagaccggtcgcctttggcagatgaaggaccacagctcccaagaggcctgagcctgggccgtctcttcccagagctgacacctccagacacccttcaccctaacaggtgagggccagtgcacggcaggaggaagggggcaggggcggcctggacacagaggctccccttgtctcgcagaagcggggacagcaagagttgggccagagcaagcagctgaaaacgaggcgattccaggtctgggaggggggcagggaccctggggcaggggctcccaattacttccgggtcagagacccgggcctggatcccgccaagtacctcaagttgcctgggcagctggcggcgggcctgggtctgcccacccctcaggctgtgggtcctccctcacctgaccagccgggcgggcagcggcacttgtactccgtcagcgtgagcaggtcgcaggtgcccccgttgcggcaggggttggtgaggcaggcattgtccaggggtgtcaggcagaggggcccagagaagcccagggcacagctgcaggcatagtctgccacgcctctgcggtccaccacgtggcatgtcccggcgttcttgcagggggtgctgaggcacgggttggggtcctggcatcgcgggcccacgaaggccccgccacagctgttggcagatgtgccagggcagttagttcccacctgcttccccagcgcccccgccactcagcaccgggaacctgtcatgggcacagccgcctccccccacaccccgggcacgggcacaacggctgcttagcggggttcccttagggctgataaaatgttctggaaccagacacatgccgcgattgcacaactttgggaatgtactgaatgccactgaatgaggctgaagcaggagaatcacttgaacccaggaggcagaggttgcagtgagccgagatcacgccactgcactccagcctgggtgacagagcaagactcaaaaaaagaaagaaagaagaagacaaatgactgctaacttggggaacaagctagagactaggatgttccagcagaacccagcttggactccacagcccgggcaggggtctgggtctacacccgcggagagccatggagaggagccgggtgcattagctccgtagagcctccgggtctgcaggcctatctgcttttcttcccagctttgctaaagcgaacaggcattgcttgggcagtaacaaaggccgtggtttttccaaccttcaggtgtcaacatgatggcagccacggaaagtgtggatcagccccttcctacgtggaagcctttctttttcttttcttttttttttttttttttttttgagtcttgctctgttgcccaggctggagtgcaggggcgcgatctaggctcactgcaacctctgcctcccaggttcaagcgattctcctgcctcagcctcccgagtagctgggactacaggcacctgacaccatgcccagctaatttttgtatttttagtagagacagggtttcaccatgttggccaggctggtcttgatctcttgacctcgtgatctgcccgcctcggcctcccaaagtgctgggattacaggcgtaagccaccgcgcccggccaggaagcctttctgatgggacacctcaggctgagactgcaatggggatgggacatctcatgtcaagatcgcactggggatgaaggctggcccgttccctgcccacgctcagcccccagacacgtttccctttcggcattgagtcttcataactcacatccaggcacatcagccaggagcagaagcacccacattacagccggggaaaccaaggtgccaggaggaggtccctctgccaggtctctgcaaccccgtcaaggtgggtgaaaggctgcccctcaccccggacacacagtctgggctcagagagaacaaggggagccaggggaggggtcctgcatctccacccaggcctggtctcacctgttccctgcggcaacaggcgcagagcctgccccccccagccacctgctgtggtcataaatctccggccccagtcacctcctggccttgcgctccgggaaaaggtctgggacccgccgggcgccgctcttcccagtggtgaagcctctgaagcagaacatgccaccagcctcagcggccccagcggcccgggaaggcagcagcctcacggctcaggccctgggtgggcatggcctcctccagatgggatgtacagagggaaccgtcccgccttccggagcccacctgggtgcggggctgcggcggccgcctgccccaggaccggccctgaagctgccggcttcccacaggacccccaccggccccccaagtcctcgcctcctctcccgcttattcccaccccagtgtctccaatcaaacctgtgctatgtgtggcagtggcctgggggggccttaccccgaggggcttgtggaggctgggggtgggggttcctgtgcgtttctcagcagccagccacgcccctgtcccaaaggcccgggaggcatctgtcttccccgaaggcttttacccgtgaccacggcttgggtagagagaacgcaaaagggccactctggccgaccatctgttgccagaagccaaaagtcccaaaccaactggcttaaagaaaacacatgtcaccccttccaaaggggctctggggaattcactcaggccttgctacggctcctgccagcccagtgagcgacgggcacagccccggaatgaggctccccctcctccatcccatgtggccggtcactccggggctgcagcgacagacctgcctctgcgggcacctgttgggagggcagacgtggttcccactgcatgcagatccagttacaggctggccggtccccgaggtggagcggccgctgggaacccgtggagtgcacaggctgggctgggctgggctgtggccacaggaggggcgccctccctccacataaatgccccattgtcaggcgggagttggccacagctcccgcttggagaaaaggccctttttgctttcccagccgctgaagtcggcagggggtgggtacaggacagagggcgctcggtcatcaaagccggggctggaggctcctcagcctggcccatgcaagctggtcccctgcctcccggcccctcgaggctccaaggagcgggaaaagctcacctgctgggcaagacggggaggaggggcaggggaggcccatcccacagctttaggggaccccagaggggagacgctggaggtccgagcccctagagcagtctcccaccaagtgccctgaggtcacaggacattggctgtccctgaatggaccacgacactctgcccggacaccgggccccactccccaccctgagcgcggaccccaacgtggaggactgtgggagaatctgcccaaccggacgcatcccagttaacgaggctgtatcacgccgggccagcaagaggaaaacacgccccataaatcaggcgtcggtgctcggacaaagggcggctgggagcaggtgtcagacgtggcggcagctgctcccagcgggtggggcaggagccccagccggaggcctgaggaggctcccgtgggggaatgcaggctgagagggcccattgtccgcccccactcccagcctgggcatcggacaccacagggaaggcccctgccacggccccacagccacggcttggaggttccgtgagacgcgctagctggggggaaccgggccgagcctggagaaagttttgagccaggtgtgggggtctgtgtgtggggggcagctttgggcccagtctcccgctgctgctgtgggcagcctccagcctgtgcccgccccagtctgtacctctctcccacatggccacagagctggagcaccctacagacggcgaacacctgccctccgcacagcacccagacgtccctgagaaggtgggagggacctcaggcctgcagcatggccatggccaggaccaccagcctgtgagcaaatccttcacagctttggcgctggccacacccccggtacccgggccactctgtcttcaatgctgtcccggcggccaggtgggtgtgggccgcgaggtgggcgccagggcttggccgagtgaggtggcacccaacagctgccgcgcccacggggatcctcagggcttccatgagtgacccgcaccccaccttccaccgtccccgcatctcctcctatcaggggcggtggggagacccctctggggctaaaaagtgaggcttgagatagggaacgccagtctcccccgactggacgagagagctgccctgtccaccaagccacccagctctcgggctcccacggaggagacccaacccacgccaggtgtgcccccgtggactccccttccgtgcgtccctcttagggtcacccggcacctgcctgtcccatcccccacgctcagtggcctggcggcgctggggtaacctgtcctatctgggccccccgcaggtgagcggcgggcggggactccaggagggctgcggggggagggtgccaagtggccccggcgcctgctgtgccgctcccgccacctctaccgccaccactttgttcccgcctcagtatttccactgtgccactcccaccctccctgccagggccgctccatggaaatgcgactccagaaagcagcaggaggcagatgctgccgagacctttcacccaggacgaattctaaattgtgctgttttcctttctaagctaagcggccatctgccacccccaggggacagaagacagttccctccgccccaaaatgagaaggaggggtgagagggactcagtgcgggtaggactcactcacttcctgccctcaaggagtttatggtcatgcagggccagggatgggggcacaggcagaggccgagcagaggggtgggggtgtggggtcagctggacccaacccagctggggtgtcagtgatgtggctggctctgcacccgccacaggaaccagagaccctgggtgggagaggtgcttcccatggctccaccaggtgacagcacctcccaaggcaaggatgggcagggacagtggggggggatgggcagggacagtgcgggggggatgggcagggacggtgagggggggatgggcagggacagtgttggggatgagcagggacagtgcggggaatgggcagggacagtgagggggatgggcagggacagtggagggacgggcagggacagttggtgggacgggcagggacagtgcgggggcctctccggtgcacaggagctgcacttcccagaggggaaggaacggccctgcacaccccggctccctgggaagggaaggggaggagctgcccggctgaaatcagcatcttaacacatcccacctgctccccagcagagccacaggtccagccccacctgccctccttgggcctcactgccaatcccggcccactgtcctgccacagaagcccaagggtcccctggcagcagtgtggtccctcacagggcaataaatgggggtcttctccccagacacccccaacagctgctgctcccagggagcccgtggccacgtcctgcaggagccaatcgctaggcggccagcctgagggtgcccctgcccctgggacccctccctcaccagcaggacctgcccccagcctcaaggggctttctgcccagaggggagtctagggctcccactctgcctgctcctgtgatggcaggggcacccccacgccctccccagacccagatcctgccgtgctctgctaagacccagcaaggctgaccaccttctacctacgccactgacagtgggccccaccaggtgacctgggccacacagacaggcccacccatcggcctgcccaagcaaatggggccatatgtggactggctggggggacactgtgaccccctactggagacggggagacaaggccagacctgggtggggatgcttcccaaggcaggcttccatgaggccaacgagcccagctctagcccggaccaaggcttctggggcagggggagtcctgggacctcagcccctcccttgggtagaggctagaccaagtttccccaatcccagtgggcaccacccaccttccaggaggcaccggctgctaagaaatgagctgggcagggggctcggggtcccacctcgggtcctctcccactggaacggccaagcagcccagccctgggggatggaggaggcttgggaagatgctggaacctcgttgctcacagccccttccctggcctccccaaatcccccagaacaaagagctatagcaaggaaggccccgggctcctcaaacctgccaggaccctgtgtcccaacccctgttcaaacagctggctggagcctctgcggtggctaggaggccctgaaaggcgccctgcagccgctgggtctttcttccctttctgctcccggcttccttccccatcttggacaggagagagggatgcaggcaccgagggggccaaggggcccacgacagcccagcaccaccaggcctgttcaccgttggagcacaaaaccacgagattgggggctgcgatgtgggatggctgcctccagccaccacctgcggtcccacctgagctgtggtcttccccagcgcctgcagccgttgggctggagctgctgaaagctgcacgggggccctgccctggctcccagggccccaggaaggaggaaaggggcagtgggggcttcagggaggtgggggcccagaaaaggagccagccccaaacagccgccgctccggagacagcgggcagcagggggcggagttgggtggggcgggggtcgcggccggcccgccacagcgcagggacccagccggggtctgagccggggccaggctttccggcccaaacagctgttgccggcacccccagctcttttgtctgcaaatcttttcccccagttgcatcctcggatggtttaaaatgtgcgaaggaggaagtgcaggaaggccaggtttcctcctctggctccggggaaaccctttgtgtgggaggcgggatggggacagaacctgtcctcccgggaagctacctttcccgcagccgggaaaacaatgccctcacccgacatgggaacggctgtctgcatctgaccgacagaaggcccgtggagatggcggagctggggtggccactctgggggcatgtggccagcccctccccaaaatgccaagacacagcccagcaggctctgagaccccaggaactaggtgtcaccaaagtgcccccgcaggctgtttggagtgtgaaaaacgcctgctggagccccacctgctgctccactgcgggaatttcccacgcggatcccccaaaagcaggcatgtgtctcctgccctgggtcaccccaacggcccctagggacccatgtggacaaacctcttgagttggagaggccaagatggtcatgacacgccggggctctgctcccaagaagacccagcccagccctgcaccccacgatggctcagaggcagggaaggcaatggacaggcccacagcagcgctgctggagggctcaaaccacactccatgaatgaagtcgggcatcacaggctgcgctccgggccagcgccagacatgcttctggcaacctcccaccactgctcctgaacagatcctgtcgctgggggtggcaggaaggggctccccggaggggctcctgttctcctctggagtgagccccacagccagcagggcagtcgcccggaggtgctgactccatgtccagcgtccttgttaagaatgctgcagggagggaagggatcccgagacatctgtccggcacacaccagcccagcagtgaagaaactgagcccacaaccctcctggcctgacctacactcgggctttccaagctctgtctcatgggacccccacaaccgccctgggggcgtgtaatgggcccatttcacaggtgagaaaacggggcagctatgcccagcacaccacccggatctgaaggcagctcagaaccacacctgctgatggggaccagagcggggcagggcaaggcagctccccagggtggcacaggagtggcagaagctccctgggaaagaggaggaaggcgcgtgtcccccgcacccccagccccacccagacggtctggatgttttgcctgaccacctgatctcccaggaccgggaagtctggagcagacaaagcattcttacagctccaccgaaacacaaaaccctagggtggtgggggcagagccctgggcgagagagacccagcctcccgctccccttccttcctcccgcccagcaggagggcaccgatgccccttcacccacagcacccgcggggcgtcggcactggtgaaagagggacgaagccgaagcccacgctgccggaggagcactcctggcatcccgggggcagacgccgccctcctgcgcctcctcccgcctgtcccgggaaaccaccaggacacctctgtgtgcctcccgattcggccgcagatggacggcggcttcagtggtggccccagaggtcacctcatccccatcacacccgccggctccctgctctctgaccacacgaggcacagaggggcctccgagcccaggaatcctcctctcggaacaccgctcgcctgccggcccagtcccagcgcccagcccggctcacatactggcccactgtgcccctggcaccccctcagagcctcactctgcccgggcccagcgtgatcaccgggcgcctgggattaccccacacttgggaagtgggatccaggcaggtgcctgcagccctgggaggggcccataaggaggggcacctgggggaggggcctgcagtgccacaacctgggggacaccagggtgtcccaagacagctggcacaggctggggactgtctggggtacctttccctgtggggaaagttggggattcttgggctggacttggcaggtcctaaaacttctgcccctccaaggcactgaataatgcccagcctcgcccagtgcctcgcggcctcgcccaaagatctcgcactacctcacccaatcccgcaggacctcgcccaaatcccacacatgacctcgatcaaatagcacacaactgcatgcaaatcccacacagtctccccagagcctgtggctggcctctgggagagaccttcctggaggggcccccacagcaccaggaaggggctccagggtggatgacacagatgacacatccccgggggagccgggcgtgccgcccgagacccagctacacctcccacagccgccatgactccgtagccaactcaaaagaaggcgcaacaattcgcggcagtcgcccagccacgaggacggcagctggggctgtcaggagccctgggggacacttcatggccccagccgcttcccatctcctaaggaggaggggagctcagagaggtggtggcggcccggggtcgcacggcccacgtgggggaaagaagtccgtggcctgtgttgttgacccagtgccaccccacacctggaagggggaaggtctcgtgggggtggccggcctggactgcagcccctgcaggctggagccaagccttccagtcacctgcagccacccacctgcctccacctccattcccactgcccacctggccccagggctgccgacagcccagccaggcccgtccaccagagagctgcagagctctgtgctgggccagaccctggaggcccaggacaggacctcgccacggcctgagccccgccaccatgtggaccctggacactcagccccgcccggcctccccacctggctctccgtcagacaggaatgaggccagcctccttctgaccactgaaggggaagtaggaggggccacccaggggctgcaccccgggagctgggaccaacccaggtccctctataaggatggagagtggaggcccaagggggggactctggcccagccccctccgcgcaccagccagtgcccagcctgagctcaagcatctcttactgaaaagccgtcagggaaaccacacatgttcaacccctggcggctcccccaaacctctcatttccagtaactgtgtgtttccgctcgtcaacagctgaaaccgagcggaacttggggggccccaccacgcggccctgctgtgcggcacggggctcatctgtcccccggctgcggggagtcagctctcaccgcccacctccttcccagatagtctctgtgcccactcgacggcccggcaagcccagcccctgcctgccacggccacagcagcctcagagagctgccctctctggccagggtcagggcctgagctgctgcctcccgcagggtcgagggcaggacacttgtctgaggcttgggtggggcaatggcacctcctcagggcctcagcccccgggcaggctcggtgaccatgggcctacagcagggaaaattctgggccaaaagctccagcctcctactagggcatctgtctgcaaatgcaccttaacctgaccgcttgggctgtgggggagcctgtttcagggaaagtgagggacgcgccagtttcctcctttggacttgatgaggcacgaacgcatctctaataaagccaggtctccccgccgtggctccctgggcgggtgcctgtggctcgggccatgagtcacgctgggtaaccccactacggggaagagggcaggaagctgggagccaccgcctctgtgcccggttgtcatctcggcacgagggcgaccgtcggcttcgtcctgccctcatggctgagggcttttgggatgtggcgggagacgggggagtccacttctcaaacccggtgcatcctgcagggccgctgcactcacaaaaaggctgactccacacaggacctgcctccctgggccttggctcaggctggggcgagactggcctcctgtgctacctgtggaagagtttgttcagcaaattgacagtgtcaacagaatgtcaagggggcatttacccagctttaaacaaccaattcaagcccttcagagatgcacaatggactccgaggccaggggactgcgtagacagggtcgacatctgatgacaaattctcatctgccaattagagcaaggtcggggcgtgtcaccaacctcagtgccaggcggagcagaaggaacaacacgactatttcttggggaaaaatctcaactagcaaccaaggagctggcaggcctcccactgggcgagaacagcgcccacctggtgcccaccagactgaacagccccgtgcaagtgaggccgggtgagtgttctgtggccattggtccctactgtggcggcaggcgctgtgggggttgggtccgggcagcatctgggcctggcctgatccggagacgcccttggtagtggccactcacagactgtgattgcgaggaccccgatggggccgctgtgtgtgcctgggaactgcaggtgtggatgtcagaggcaaagcctcccctgtgcacgcccagcacatcagagccccccagttccctctcacagagcccccagtccctccccacagagcccccagtccctccccacagagccccccagtccctcctcacagagcccccgagtccctccccacagagcccccagtccctccccacagagccccccagtccctccccacagagcccccaagtccgtccccacagagcccccagtccctccccacagagcccccgagtccgtccccacaggccccactggacaccaggccccagacctccttccaggaaattgcaggaaccacagcagggcagccccacagacctgagggaaccgctgccccacccccgccccacagagccctggtgtctgggctgcagctgaggctgaggggctgaggactcggaggatgggatctcccgcccagcgggtgcagccaggtgggaggggccaggcccccagggttcacaaggccccttggggacccacccgaagccaccgctttgcattaggcagggcgtgcggagagggccctgtttaaccgtgcgggctcaatctggagtgtagacggcaggacgcccccagccctgggcccctgagcctgtgagtggggggttcagaggtgaggcctctacagaagtctccctcccaggggcaatgggtgcagggtaggcggggagcactcaggatccctcccaggggcaatgggtgcagggtgggagtgggtggaggggggagcactcaggatccctcccggggcaatgggtgcatggtgggtggaggggggagcactcaggatccctcccaggggcaatgggtgcagggtgggtggagaggggagcactcaggatccctcctggggcaatgggtgcagggtgggtcggggggagcactcaggatccctcccaggggcaatgggtgcagggtgggagtgggtggaggggggagcactcaggatccctcccggggcaatgagtgcagggtgggtggagaggggagcactcaggatccctcccaggggcaatgggtgcagggtgggtggaggggggatcactcaggatccctcccaggggcaatgggtgcagggtgggagtgggtggaggggggagcactcaggatccctcccggggcaatgagtgcagggtgggtggagaggggagcactcaggatccctcctggggcaatgggtgcatggtgggtgggggggagcactcaggatccctcccaggagcaacgggtacagggtaggggggcgcactgaggacactgctggggagtttctcctcccagaattccacaggtctcggagatacactgaaagcaaccccaaaatgctaggaccgcctataaccgccctgcaccacccctggggcaaccaggcaccccgatgctaacacgcacgcatcctcccgacagggagaagtcccccagctgcctgcagacagggcctcgctgtcaagggccactggctggcctggtgccctgcaggggacatggcgcttccccgtcccaagggcaacttggagaggacaccatctgtgtctcagagtgaggggccaggttcctagctctctcctgtcacacgggcctggatctaggccagggcatagccagtcactctaagctgaccctgagggtccagggggagaagcagcctggagccaatcacacagagctctgtccagggaagggaaggccccggagcaggcagactgggcgggtgggggctgagatgcctgcccgccccatggatgtgtccaaagcctcactgccccccgctgccccagccaccgccgctcctttggtctggagctccctgccgctgaccctgtcccagccagcgtggaagctgctccgtggtgggcctcacttgaaagccacagcaggtgcacccagatggggtcccacagcactgactttgcacacaggaggccatgaaggctgcagtgactacccctagcttgtggccaagcccgtccatcctgtggcctggttcttaaggggcatgctcctcccctgcccaggggggcctgcatctgccgtgcccacccataccccagggttcagcatgtagtagatgctcaataaagaccctctactttgcattcttacagcaccaggcgtgtggacgctcagtgaccgcggccccactgtgtgcctcctgggggctaagggatgctgaacagcttggcggctggcatgagtgaggcccagggacaggttgtgagcctgtctcggagtcctgagcaggacaggggccgcgggcacgccagtccatcctacaggttcacctgggaatatgccaggactccctctagggggctctgtggctgtcgggtggctgcaccggcccagagtgagcgccatctcttccaggaagccaccccggacgccctcccaacacctgcctcctctggactgtctgggagctgggatgctggggtccacctctggccagtccctgatgcttctggaggctaaaatgtagtcctcagaagaatgcagttctagtccacgcgtgacatggatgaaccttaaacacatcacgctcagtgaaagaagccaggggcaaaagaccacctatggcacaattccattcataggcaacgtccagaagaggcgaattcagaggcagaaagcgggttagtggttgccaggggctggggcagtcagggcagagtgacagtatttgggtacagtttctgttttgtgcagtgagaaagtcccggaactagatagtggttgaatgaacttgtgaatggactagatgtcaagcaacagcatgctttagttcaaaagtcacattttcagcctggacaacatagcaagaccccgcttctgcaaaaaaatttaaaattagctaggcatggtggtgcacacctgtggtcccagctactctggaggcggaggcaggaggatcgcttgagcccaggagtttgaggctgcagtcagccgtgatcccaccacttcactccagcctgtgtgacagggtgagaccccatctcaaaaaacaaaaaagtggccatgcacagtggctcacgcctgtaatcccagcactttgagaggccaaggcaggtggatcacctgaggttaggagtttgagaccagcctgaccaatatggtgaaaccctgcccctactaagaatacaaaaattagctgggagtggtggtatgtgcctgtagtcccagctactcaggagcatcgcgtgaatctgggaggcagaggttacagtgagccaagactgcgtcactctaatccagtctgggtgacaaagcaagactccatctcaaaaaacaaacaaaaaaaggcaaattttgtaatatgaataagtcatcacccagaatccctccatatacatatccatccccaaaccagtccttagctccctttgctcccagggagcagggtggggtggggcagggccacaaggagaacccaaccaggcaactttggaaaagggcttccctccaccctcccacccctgcagccactgccccttccccagctggggcgaccaccgagcccagcgcaggcctcgccgcagggcccacagccaccaccacgccttcagcccgccccagggtcccgctggctgtagttggaaggggaatcacatacagatggggaaactgaggcccagggaggggacagtgtggggagcacagcaaatcagagccagccctgcttcacagcccctcggagctccgggccccacaggagaaagcgccagcgctgcctgggaaactcgaggccgtcaaacgcagcccggcccacaggtgtgatgccccaaagccagccgctcgttaaagctgctggtatttcctcctcagcccggggaaagatccggaaagttctggatatgcctgcacatgaaggtgaaagctgacgccagcctgcctcagatccccacgccctcgcagccacagctttcccacctgtgcgctggggatgaaaactgcactggcacacctggagggtgggcggccgtctgccagggcttttacgaggctgggtaacagcggcgtcctgagtgtggagctgtcatcgctgcattattgaggaaggcaagctagacgcccaatcgattctgcaaagccacatcctttcactatttatagacgagacatgaaacaggaaaggtcccctccccacagcaaaagggtgcagtccctcggcccggcctggaactgcccagtgggcaccggtggccgctgctgcccatcacaggtgcagggaatgaggaatgaagccagtcccggctcctgtggggtctccagtttgccgcccgcatctgggggtccccgcacccagctctgccctgtggaagcacttcccctggtgcactgtctgccctgccctaccctcttcctgccagggttgctgttttctttctccctctctctttttctattattattcttttcaatggaaaacatgttggctgctgttcagaggcagggcctgccccaaggagccagcttccttcagagcactccaggctcccaccccagtctccgccccaggccttcctgttcctgatgtctccccagtctgagtaggtgagactttctatttgacactgtgtggggttttttttgttgttttttgtttttttgagacagagtctcactttgtcacccaggctggagtgcagtggcacgatctcagctcactgcagcctccgtctcctgggttcaaaggatcctcctgcctcagcttcccaagtagctgggattacaggcacacgccactgcgcctgggtaatttttgtatttttagtagagacgggggtttcgccatgttggccaggctggtcttgaactcctgacctcaggtgatctgcccacctcggatgctgcatgtttttaaacatgtttttctaaccctggcgcccttgaagaccaggttctgcataaacaggaggtcctgtcacaggcctttccgctcagctcagcatgaggaggagaatcaacctgttcctcccctggccacgcccaagacgaggcaggtgactcaatggaaagagccagaccgggtgacaggagctaccccgtccctccccagcctcccaggccggctgcagggccaagtcacttcccgcctgagcctccttcctcttcttttaaggggaagccacgcccccagtccgcttgtagtcgggaaatgacggggcagctcaggctggctggggctgtgtttagggacattcgcttgggagaaggagaggggcagggctagtaggaattctgccactgctgtgtgaccctggggctgatggcgacttctctgggtctcttcttctcacttatcggtgcctgatccagacagctttacggggctgccgggagctatgccaggccaccaccgggccggcacacccccaacatgtcccacatgtgagctaggtgcctctctcacgccttgctgggaagtgaactccacaggagcaggggccatgtctgccctgtccccaccgggggcctggcctggagcagaacgcagcacacagcaggcgctcaaacgtgtctgtgaactggagccaccctgggagatggacttccccggagctggagccatcctgggagatggacttccccagagccggcaagtccctccccaggcagtgccaggcccagcccaccaggcagcacctttaggattctctgaattcactcgtcaatcaattaaacattcaggaaggaggctctggaaaccagcactgtcagccaacggggagaaggcggggaagaaaggagcgctgaccaggtgccctctccacacggttctcatgcaatcctcacacaccaccaagagatccagcgtgtatcagcccggctgacatgctggggaaactgaggcttgcatgacctgatgacccaaggtcacagagctagtggccaggccaggcctcagacacgaggttgtccaaagctaaagcgcaccacccagcaggcagctggacatcctcctggaggtgctgggtgtgacagcctacccccatttctcccagctcctggaagacgccccgtgccattctgactctgccgtcagcagccaacatcttagctgccccctgcctcaacgcccagcccagacgcaggcagccctgggagagcgtttcagaccaaggacgtagtctcacccagacagatagggtccctgcagctcttcccagctctcctcaaaacaaagagaaaaaaggtggagccctcttcagtaccccttgctcacactgacggagctgatgagggggctagagaagagccaagggccacagtgaccccctgggcctgctcagaaggccaccatctccgaccacagccaccacggccacacctcgcacagcagctgcccagagaccaaccatcctccgcccaccagcatgtgctgccaggtgctttctacctggccactggctgaccaggccacggcgacactctgacctcctgggaaggcattttgcaccaacaaaaccactttttccaatcccgggccctgcaaccacctgattggcagcttccggtgaaggttccttctctttgggatggaaagaaatgattcacccagtactagtgagccaggcactgtgacgcccatcatgaccatgccccttctacagcggaggcagcaaatggcaccaaaagccaaagctctttccggggtcacagctggataccacggggccaggattcccactcaggctggcagggctccaagagcctgcaccccagactctttcgagaaacagtgtgggtttctccccttgctgggggagccaggcctcctgcaggtgccctggctaactcctggacagacctcctgggccttctgagaaggatgggcaggaacgggaaggcagaggcacctgaggggtgtatgttgggtggggctcaagcccagggagggagcccggggccttctccgaagcggctgcaatgtcccccagactgctgtgtgagccctgacctgtgcctccacaagccgggctcggctgtggccctggcctccaactctgcggcccagaagcaggagcctgaggacgcgcttccgtcccatcttctcgttggacttgtggggtgtgcacaatggggtctctgtgggctgagctcggctgcctgtcaggccaaactgaagcaggcttcccgccaagaaggagggggcgccaggccccagcaaaggggacaaggccaggcaccaaagccatggtcggcggcctgccttgggctggaaacagctcaccgggatcccaggtttggggaatgggaaagtgggcccatgacaccagtgttttgcggccctgtggcagggttttaacccagacaccagggagctgcagcaatctgtaccccaaagcacagcgctctggcccagggagacctcagtcccagacccctgtgggccaggctgtgcctactccctggtgccactgagaagaagcaacaggcccccaattttcccagcacggtgttcctcccaccctcccaaagtcctctgcaggagcaagaagcttctcccagagccccgaatgggtgagaggcaaagtccgagccgggagcgcagtggcggggaagggggttatacattctgggaagccacgcataattaatcacacggcattaatccgcctcccccaacaatagctgctgcacttcccctggatcccagctgtcggtctctgaatgaaaggaaacaagatttagggcatcaagcgtccgtgcggcttctgcagagggagaagggggccccaaaaagcaaaaaaaaaaaaaaaaaaaaaagtagtgcgcattcattagtgtctgacaaagacacaatcggctttgtccattaaactgctcacagacctgcttaattggcttcagtttggggagggtgggggccggggagggagggggcctgctgcccacaggctgggcagtcggcacaggcaggagccgggctggggttgtcaagggaatgggaccttctgcagttggaatgagggcgcgcagactggctggggagccatttcttcatctgtagctcctggggggcggagggaactctttttccagacaccaaacacctcctcattattctcatcagggatggactcaagttgaagggcatcggccacagcagaacagttccccacggctgatgggcactcacaggcaggcaggagggagcggttccgcacgacttcccggccccctcagtgcccattttacatctgaggctggcagaccagaagggccacgggattttgaggtcagagtttgcagatgccaggacagaaaccagactcaataattaccccacaccccacgccaaaacatgagttccaccttctcttccccagccccagcctgaggccgggaagagggagctggggcaaacagagagcccaaaggcgggtccgattttgaagagtcaatttcctttgaagaggcatcacccacccggaggtggcatcacctgcccaggaagtatcacctgtgcctagaggaggcatcacccgcctagaggaggtatcaccacccagaggaggcatcacccacctagaggaggtatcaccacccagaggaggcatcacccacccaggaggtggcatcacccgtgcccagaggaggcatcacgcacccagaggaggcatcacccgcccaggaggtggcatcacctgtgcccagaggaggcattgccgccagcccaggaggcatcacgcacccagaggaggcatcacccgcccaggaggtggcatcacctgtgccagaggaggcatcactaccagcccaagaggcatcaccacccacctaggaggcatcacccccgagaggaggcatcacctgtgcccaggaggcatcacccgcccagaggaggcgccccaagttggcagggtggtgggggctgggcctctcagtaaatggtccagagcttcccctggcagatcaactgtttcttggggacttaaagaagaattggggtactgggactcccacttagtgaccccggagcctgaggtggcccacggaggagtgcccaagccctcagcagccagaccagctccacacgcagcataattgctggtgattaagtaattgccagactttgtccaataaaagtcagcacgtgaccgtgcccagactctgggccatctccagaagacaatggcctagtgttctgtcccctgcgcggctgcagaaggcaggggctctgccctcgacaaagcaacaggtcccgcaggggtggtactcacacgcaggcctccgtgccattggccgcttcacacttcccgccattcaggcaggtctcaccgggctgggagcatcgcgggcctaggcaggggcaggagaagagaggtcagtctcacccgcaccaccaccaccgaaggccctggttaccctgggggcggggacctgcacccagccaaggggcatcgtccgccccctaccccggacgcactctgctcagtatcatgggttgctggggcacgggtccgcaggaagcccctccatgaaaccaaaggggcgtcaacattctgcccagagttctgtagtcagaaatggggggaaggggagcagcagggaacacgtcctgcttgaagcagggtggggtggcctgatgtgccgcctggacgcagtgggggaaaagcagagacaaagtgggctactctccaaagcgttgccccccaccctggaggctcactgaggagtctggcagggcagggccccccatccagccgccgagattgcctctgttcaaacccgttctgcaagggggcagagctggacggggggagggggggtggccacactcagctcccgcccgtgggaaaatgcgacagctgctcgcccgctaccccgcccgccaacaaagcgccggcctccgcctcagaatcagagcggcccattgtggagtcggggccgcctccaggggcaccgggacagcaccctggggacgcggccccgcctccgccgacacccaatacctgcctccgcgggcgcgcatctccagggcagcccccatacacccacaggagggggatgaaggtcccccattcggaaggaattcgaccccatctcgagaagggatcaattactcaagcccctccctccccatcttaccggggctgagaaacgggggaggggggtgtgacacagagccgcactttctggaagaggacagataattctcgcctccaactctcggagaaagagtggattaatcactcgattccccagagaccccgctcgctgtgcggcggggagaaatgtaagagccccccacccgcgtcccgctctccgcccccaagctttccaaacttcaactccgcaaagcaaaaggaaagttcagtccccccgggcgcggcggcttcttacgcaacccctcccccaaactgagagccgggctggggggcaccggcgggcggggcgaccgggagcccggggacccagcccggccgcgcgggtcagtgaaggcgaacgcggcgccgcagagcccacactccgcgccccaacatccgccccggcgtgggccagaggcgaagaagaaagaagataaatggcccggagaagcaacaggaaaccaaaaccgactctattcaaatcgaaaaatagtaggcagcccgcccgcccggccgaccggcggcaagccccacgcgcggcgggtgaagggcgggcccggagtagggcctccggggccccagcaccccacaccggcctcctaactcggctccaggcacgggcggcgcgagtccgcctccacggggggatcgagggggaaggtcggtcctccctgatcccgggactccagaaccccacgccccgggccgcccgcttttccctctccatgctggcctccccgccgcccgctcccagccgtggggcgcgcgcgccgggcgccgccaaagtttccaaagggcgcggaaagtgggggctcgcgggtgggtgggcgcctacctcgtgcggcgagcgcgggcagcagcgccaggcagagcaggggcgccaggagcggcggcatgcctccccaccggctgccctctgcgcccgggcggcggcctcctgcgctggccggcggggctgggacgcacacgcgcggcgtacggtcccggggcggcggcggacggtcccgccctctcttccccggctggctggcggcgctgtgctctcgcaggcccccgggcccggctccgcgcccggctcgttccttcgctgcgctcgcgcccgcgcccgcgccccgcgccccgcgcccttgcgctccctcccgcggccgaggcactagtgaggctcagagtcgaggtgcgctccgcccccgccggccccgccccgcccggccccacccccgccggtccccccgccccctccgcggccacctcctcccgcacgccccgtccgcctttgcgcctccccgagctgagccgcgcgtcccgagcccagcctctccggggaggagggacccggcggcgcggcgtgggtcgggagcgggcgcctgggactacttctcgtttgaaagttttcagaggccaaaagtttgagccggggctgcggaaggatccggctctggcggttgccgcgctcggcgacaactggcgactgaaatttgcatgtgaataagcggaggagcccggggcggaatggggagggcgaggccgcggacagccgtgtgcaccgtgcgctgggccgggcggggagcagctgaggccacgttgggggaccccgggcccggggcagggctctgggagagtggcctagccgtgtgtgcgcccctagcccagcggcttcactccctcccgagggccccgtggccgcggctttaggcgtccagaggatcgatcgccgccagacatccctggccgtgattgcccgagcacttgaccgcgagggatgggggcgccgcggcctctgggcaggggactccgggcgccccgagggagcagccgggaccagtgcctcgcggacggattgtgccccgctcccccaagggggacccgcgtcgacacgctcctcggtcaccgtcctcctcctgcccgggcgccgcctgcctaaggtggccccagaaagcacaaacgggtcgggcggatctgccgctggcgccggcgcagcccttcccacgtgctccttccggctgatttatttctccaccacgatgccaggcacgggcaccctgtgccaagcctggttaagcgccaggagtccaaaatgcctgccatagtccctgcgcaaagttcacggcctcgtgccagggacagacagcgccccctccccaccccaacacagggtggtgagtgcgatggcagaaggcgcgtgtcccggcgcccctcctggagtaggagggctaagcctgccctgcggggagaccgaaaggctgggagggacctaggactgtgggggcctggggggagggctgcagaaaccccagagcatggtggcagaggcaggcacagaaagcaggacaaatctcacacctgaccccagcaagcctttcctggcacacctcttgccaaatgctgagcactctgga

SEQ ID NO: 402 - DNA, 132663 bp, Homo sapiens
  source 1..132663: mol_type = genomic DNA
cattctcccatcatctccctcccaactactgcagcagcctctcatttgcctacatctgggcccactccaattaattctccacattactgcccccatcttacccaaatacacccatccttgcataaaacctttcaaaggcttcctgacgctttttgatacagataaaagtcctcctcatggcctgaaaggaccttgttttgcatcagggatggcttctcagcctggtggccttccttaggactctgggcacaccatgccgctggccccgggcctcagctcccatggccctctgcccaggtctcccctcccctattcacccactcagatcgactcgtgggaagcccccgccaacctccatcctcctgtgggaggctgcacctcttccttcccactccgggctggcaacagctgagtgtcccaggtaccatgggccttccctatgttcctgagcctctgagagggtggagaccacagcaggcatgtggtaccagatgaaggagtgagggagtaaaccaacgaccgccatggcctccaatggatgtctccagcagcccctagaaggcagacactctaaagcagggagagtgcagctttacaaacgctgaagggacacgtccacaggaggttttctagcccatggatggatctcctttgctgctgtggtttccgcttctgcatggacatcctgcaagcacaggccaggcactttcttgcagtctgtaggcccacccagcctgcagggcccacgaggactctccaccccacagggcagggctggatggaacccacatgtggcttcctggactccccggagcctcttccatgaggactgaaggactggacatcttacaattgttcccttgcctaggactcagccttggggcctgtgagaaaatccagctccctcaaaagaaaactgtgtcagccagtcctgtccagctggagagtccgtgggaagggagggcagactgtctcgtgagaagcagcaccaggatacaaacacactgcccgaggaggcatctccactctctctctgcccctggcacagacgcaggaaaaagccacagctctgaccttcagggtccaactacagtgccagtgaaatttctctctgaaggatggggactgcgtcaggatcagagcatgcagacgcagcagagaccacccaccgagactgatctctgcaaacgaggaccgcacctcactgcaaggaccaatggggccacgtgctctctgcaaccaccgctgggtgcagcccaccctccgctcaggggcacaggaccctccgcccctcgcacttctacccgactgctgccgtctcagagccggggtctcagcccccacccagggcaggcttgagcggcctctccatgaggacacatggcatgggctgcctgaccggcccccaccatgtctcctcaaggagaaaccgggcttgtgctgtagacaggaagcctctgacactgcgccagcagacactcaagaaaactgccaagggaagacgtgtaaaagtttagtattttgttcaacaatttaaaaaacagatataataccagcataaaatattgcatagcaaataatagattatgtttgtacaaaatccagtaagaaaaacataattttctcatttaggatgattcataaaatacattttgagcaacagcgataacgagggtcccacatgcgtagatggcagcaccagagccagacccaccaccacggagttcgcgctcacggaacccaggcctgctgggtgtcagcagcagctaagctggatgcaggtactacaaaatgaccagcgctcggtctctgcttcctcagccaagtgcacaggtcagccaggtgggcactgaagtgaaaggctgcagagaggcggggaggacagcctgcagggcaggaggggcacagacaggccccagctgggtgccgcaggaaggacgtcaccctcaagccctcactggtagatgaccttcacgcaaaatgcctcttcgtttttgtcctcatggtcattgatgtagatcaggatctcctcctcacccactctctgactaggcgcaaactgcaagccgatggtgtaggtctctccacccccgacctggaaataagcatccaaatcccagcatccacccccgggctgtcccacgctctcaccagcaacctctctgcatggtcgtgtttatttccaaggggagctgacaaggcaggggagccctgcgggtgcatccaaggcctgcctttgacttcagcgcccggtacaaggatgggaaccagtgctcagccagtgtgacgcgttacttggactcgaaggcacacttatttccgagactgagctgtctaacattaccatgaaaagccctgggcacaacaccctttcccacactcaggagaaactttgctaaatctccagctactaaagatacaacgggcccacccaactatgggatggtacctgtcaccgccctggggcttttggaagactgctggtgatttgaggaactcgctcctaaatgcaggctaactgccctccattcaggtccccgggtcttcccctaggagtcccaggcacagccccaccacacctggaaggagtcctctctgaaccgcagcagctccgggtggtcgctgtgcaggtggaatgtcctccgggaggggtaggggttggtgtaggtgatcctcttgttgacacccttcccttcgcccgcagccaacatgatctcaaaggcctgtggagggaggggacagggagacgctgcggccactcacgggaacagccactggcccttcctccaagtattccctgagtctcctgtgcaccgtgcacggggacccccacagagataagacagacgctctctggagcttccatccgggagagacacagcacaggagcaaacactcatgcacccggccctgctgggtcagaacactgtatccagtggtccgagtcacagggccgaggtgggggtcctgcagtgccctggtattgagcccccatcccctcagcctgtgcctgccacacatacagaccttggagatgagcggctggcggcagcagaggcacacgagccaggaggccaccagctggtggcaatccacgtccaccaggttgagatggacaaagcggctgccggccctaaggggcctcacgccaacatgcaggtcctgcaccccacgaggcggcagcacgaagacacctttggggtctgtcttcaagagcgagagaggcgggtcagagcacagcctctcaggatgtgcaagcaaggggctcctgggcgcctgcagcccaatcagccaggggagcccaaggtcatgggtggttccggggcggccaaatctgaggccacaaccaaccctgacatgactgtggccgcgacttgggtccacaccaggcaagtccctcctctcacacggcgactattccctaagcgctgcctccgcagacagaactgaagccatcttgggcttaaaaccccggccagctggtggcaccaggggccgccctcccaccccgtctaactgtggcttcactaacaccagagctcctgtcactgttcaccttgccaggaattctgaacaccggcctttggggttggtgtgtacgtcactcaccccacaatggcacatctaacgaaaggcaactgccgagaggcctctggtaacagcgtctgcgcgctggaggcgctggaaaagctgctgtcagggccacccactgtgctccagctgaatgcccactgcccgtctccaggctggggttggggagaggctcagaacagcccccagagaggccgtaccttcagctcctggggatgagaggtgaaagctctcactttcctcactgtctgtgtcccccgaaggacaagggacaggcgggtcagctggcctgcgacgcaggagacatccacgcgctgcagggagtggaggtagacctgccacgtctgtgtgggtgtcgccagccagcgatccctgcagtgggatgggagccatctgcacttgtcccggaggactcagcaccggcccacgagaggccaacaagggctgccaggagcgtgggcagacaggaggctgtgcagggaaagccccagaggaccaggccacaggaggcagagctggggccacgcagggaaagccccggaggaccaggccccaggaggcagagctagggcctggtggctccacccctggctgcccatctcccacccacagcagaggctctcagggcgcagcagggctgcttaggaaccacatgtcaaacaaatgacaaggcacgctttggccaaacacacatcctggacaagtgtccacccccaataggggttctgaggctaagccaagggcagcgccacgcaggagacagggtggggctggaggtcatgccggcctgagcacggaagcccctgttagcattttagggccaagagcctgctgcttcacagtcaaatggggctgggtgaggcatcttcatgggctcacgaggaagccactctgagacgtggtcacgtggcccctctgtggtgggcactgagtgcaggttagcccctgccccatcctcagaagcactgcaggaaatctccgagctcacaccagtttgaaaggattctcacagggcttggggatccgacttaggaggggaggggaaaggggccgggtcatttagcctggaggagagagggatgggcatttccaccacagtcctgcctctccgcaggagggaccacagcttcattcatgctgttcagcctagggactcagcaagaaaaaggtaatgaggggcttctgggtggcccttgccactatctggggacagaggctgactggtgtctctccttggtggcaggagctgcatcccaagtccctcaggctgcacgtgcccctccaaggtgccttccctagacccctgcgggccctgaactcgcagcagaatcccgcctcacaaagcgaaggcccgaaagctcccccaattttaggaaggggccaagcccactttcaatccaccagcagccccaggcctgcctcctcctctcctccgccaccgcctccaggtccccaaagcctgtgcacttacgagtaaatgatgacaaagaagtctttgatctccgggcttggaccactggccaccttcagaaatatgtcccgtggttccccggggccctgccaaccagatgtgcagcacatcagggcacacagtgctctgccgaccccagcctggcccctaaatctgtgactaatacacgcagcgagtgacggccagtccctcccagaacgcatctgttcatgttctataccaatcggaattcactattctgttcactgccaaagagaagatcattagcttcctgattttacatggatctcaacaattagattctacaggagattttatccggtttcctaactggtcataacacaattattgccttatcctttacataatggtaattaataagtgccttaattaccatccactttattaactttgcttcgtgcctttttaaaatttaaattcagatgatcaaggagctgatctgctagtagaaaaaataaaaacacactcataaagctctcataaggatgtcaaaatagccctttagtaccttgggaaagaaaccacttagcagaaaacctaaaatgaagaggatcccaggatacccgtggggaagccgacaggggcgcagactcactgggaaggatctgcctgagctggggccacaacacaacctaccacattctgggtctcacagatgacgttcgggtcgctgcagcgaacatggactggggggtcctcaccaagcattcccaccggagcacctggagcaggggaaatgtcaaaaagagtcttctccacagccccagcctgtgtggagaaggccccacacattacacactataggacaggacaggctcgtcacaggtgctcagcaagacacctgctggggaaacggacgccgccacctttcccaggacagcatccaagcactgtgttccctgcatggacaccgcccatccagcccactgcggctcggctgcagccatctccacagggaataatcgagggggccacaaaaaagaaaacacagctccctggagcagggaagcctgcactctgctgtaaggggcacctaccagaaacacgcgggccgtcaggtgaggaggtaggtgttcctccaggcacacctggacctgggccgcgggagctgggattttttagaagggcagactcagccggcaaatgcgcacctagtcatctcagaggtggcaagagggacaccgtttcaaaccataaaggcaggagagagaattccccaggccccacgtgctgctctgacagcaccagggcatgaagccatgaggccatctgtcaccctcaagaggtatctacttccaacaggtgagcctgcaacatgtgggctgcagggtcagtgcaggacctgcctggaaatgtgtgccagggcggcaggcggatggccttcttcaggaaggagagctccgggtgatagaagcggaagacctggtccaccacgtggggctgcagctccacagtcaggcagagcacggcgatgggcttgccaccactcgctcggaacaagacctgtgaggaggccacgctgagtgttgggatgggcacgaggcttgtgagcagcttcttgtccctccttagacagcacacgtatctccactgttgccaagaccccctcaccctccactgccatgagcggggaaggtcgggcatcgtcaaaggcagggactgagtctgcagcagcaggtctccaccaggaggggaccgctaagcaaggtctgggccggcacccacacagggcacccaagcagccacactgccattattcctcgcgagtacagcacacttcttaaatgccagtggagaaggtctgcagtcccaagtcaaaactactcctgccatgatcccacctcccgacaccctgtgtgcatgtgcgcaagtcaggccaggaggtcctggagtgggtggtggcagggccaagttcgcggtcaagcacgtcagcacaagctctttgattccagatggcaaaaagaggctgtgcctaaaccaaaggggttagaaatagaaactttcctggtttcaaaagagctactcattaaaaaccatattgtctgaagaggtattaattgggacaactgataaaaaggctatatttgtttcaagatacacacaaccacagagacatgcatactcacacacacgcacccacacacacgcatgcactcatgcacccacacatgcacccatacacatacacatacatgcacacccacatgcatgcaggcacacgtgcacacacatgcaaacatgcacccatgcatgcacacacgcatccagccacaaatgcacacacatgcatgtacacatatacatgcacgcatgccccacacacacacatgcacgcccacatgcatgcacccacacatgtacacatatgcatgcacccacatgcacacacgcacacaatgcacacatacatgcacacacatccacccacacatgcacacacgcacccacacacgcatgcacacacatacatgcacacatgcccccacacgcacacatatgcacgcccacatgcatgcacccacacatgtacacacatgcatgcacccacatgcacacacacacaatgcacacacacatgcacacacatccacccacacatgcacacacacgcacccatacacacacacatgcacacacatacatgcacacatgcccccacacgcacacacatgcatgcccacatgcatgcacccacacatgcacacatgcatgcacccacatgcacacacgcacaatgcacacatatccgcccacacatgcacacacacgcacccacatgcacacaatgcacacatacatgcacacatatccacccacatgcatacacatccacccacatgcacacacacacacacacacatgcacacccacatgcatgcatgcatccatacatgtacacagatgcacaaatacaaacatggatgcacatacacacacaccacccacacatgcacgcacacacacacatgcatgcacacacacatgcacacacttcacacctgcacacactgagaaggagagagtggggcagggcaagaatggaaacaagatccttccaaatatatcttgctttatagtttgatttttgacttacttgtttttaattttgaaaactaaaataaatagaagtgttaatgtattaaaaataaacaaatctaagcttctatcaagttggtgctgtaattatccagagaagaattctttaagtaaatgtaaatcacaggacacaaaggacctaaagacaaatgcaccttcagaaatcttgcactgacagatagtgtctagccctggttggtactgatgttttgaaatatacacgtacataaagatggccagtggtattgtagccaaagggatttggccagtgtggtcagcagattggttatatacagaggaaattaggcaaataagtaagccaaatgcgagctaggtttctcatgagcagaaatgagaattacaaacatggaaaaaaacaggaagaaacccgtgatgttaaattggtgttggaagaactgctgcaaattcatggtcttcagcacactagaaacagtagtctgtgcacatacacgcacatatctatacatcatatatgcatgatatgcacatattgtgtatgtatgtatctgcacccacaggcatacacctcttaggtctctgctgagagggacttagcagcagtgacatcccagtagtactgagtacatctaacgctcaaatcttggtttctaaatatcattctccaaccaaaggaacccgagctaaatagctgacactcctgaaatgcaagctgagcctggggcgtcttgctgtgctgggcagtaaggaaagactcaaaggaggacaggggtgaatcaacaggacgcaggagctggcctgaagaggctgccctggttagtcagggcacgaatatgagcaacaaaataaataatgatagtaacaaaatgaataaaatagaaattcattgttcataaggatataaaaagtaaataggtgaatggggtgaaggcacagctctaccttacttaaaataccagtaatcaacagagaaggaatgatggaattggaaaatccatggcaggcaagcatcccactaccaaccaactcgggccaggtcatcagtgcacactgacacctagtgcgtcaaagtctgatgaagaatagggtatttgaacggcctcagtatctcccaacaagatacttactcatgactttctaattactagacatttcctgatattacaggaaaaaagcatggcagatgtcatcttaactgaatgaaaacagtaacatcgccagtaacaggacaaagcaacacggtgtccctcacagtatgatgttcgtagaggacacggcaaatgtctgtggaggtcctgccccaagtgcataacctgggtctaactgaaacgaacaccagaccagccccactgggcacgccctgcaggataaccgcctgtgcacttcacaacagctgcagccacgccagaaggactccatgggcagcaggctggtgggggccactggacgggccatctatcaagtgctgggacatttgtgaatgtgaatggggcctgtgatgacagaagaggagcgtcagttccctaattttcatggctctcctttgaccacagaggacagtggccttattttcaagataacccagctcgaagtgtcatggagtaaagggcattacctgataatttattctcaaattgttcaagaaaaatgcacaaacagagagtggcgaggcaaacatggcaaaggttagtgaccgggaagtctgggaaaaccctatgtggggactctgcactcttcctgtaactcttccctaagttctaaattatttcaaaataactacttgttatttaaaaaaggcacaggagttaacttgaaaaggatggcggtggcctgagagagggcagttccagcgtctaagagcggtgcctccatgggatgagaaatacaaatataacgcctcggtgtccatcatgagacgccgcaaacatggactgtctctggaggctgctaggacgcagctcatttatttgaaaattgataaagggaatgattctaacattcatcctcactttcaagtacaaagtatattttagggtaaccaaactgctgatcgggaaagtccttgtttgtagaaagatcacaggaagaatgacaggactgcaatttcaccattttccaccctggatggaacacgcagtgggccaggagcctcagctggatgcgagtgagggagacacgggtgatggcatcaggccatcagcacctgagcacggtgacagccagcatggcctctgtgggtggccttcatggacaacgtggtctgcccactgagcaactccagaggcggagcaccccaggacagcgggtcctgatccaaacgcaccagtggtagaaaggcccgtggttacagccccagcagacgatgccgaggtctgcgttgactgggggcagcaacaacagcatgcagtcatgataaaaagaaaagtccttatcagtcagagatacacactgcagtaattatgggtaaactaacacagtgtctaggatttcccttcaaactccaaattcatgtgaagagatcatatttctgacgtaaagattattttaaggtgaaaagaaatcttacctgaactttccttatctgactagtgcacagccacctgaaagtgcagctgccattaaacccctatgtgaaagtgtaagtgaaagcatcctgcaaattccaggaaggtcacagactggccatgctcacagcataaagagacaacagaatgtccccgtcttcccacggaggccctggccctcgccccctttgtgctacattggcacagaaacctcgacctctgggcatttggcaagctactcacttcccaatgctgccacgggctcacaacggtaaggcccgtctttgctgctgtccctctgtctacggtcatccacctgcagcccttaccattcagacctgagctagcagaggaaaaccttcctcccaacggttttggcaacaggacgcgatggctgggacttcccactcatgtaaggaaaaagcgttaacctagagcactcaataaagatcagatacattccttagatcaaggcaaagctgtggctgcacacttaaataaaataaagcaagttttcactggtgatggggcccggtggacacagagggccaggctgcaaccacagtgagacccgggccacgggaacgccacagcctcacaggactgcgctgaactctgaattctgtcctccaggcaatgtgtaagaaagaccaaagctttttaattttgtttttcacttcccaactactacaaaaggcatgtttctaccgaataaaaaacaaccttcagaaactgccataaagcagcagtgtctcaagctcctcctgagaatgtctcagccagctgttgagaagcaggtgccttactatacggccttcgcttagcaagggacgtaaccaaggactacgtcttatttccaggaagaaccacaccacacactcacacaccagggaatgctctgcgtgaggctcaaggagtggccgcaggctgtggcagccaccacgggaactgcggcttcacacccggagagccctgggctgtgagaaggcggccaccaaggaggcatttccgaccagataccatgcaggctgtgccagcgcccagacggagctgccctgcccagcgaggacacggaaaaggccattcccaggcccacgccacccctgccctgacctggccccagccctcccctccaggaggggagagaaggacacaagggtcaggccctgggaatacccaggaagccccgagatcagtttgtcctccgttgcccctttaccttggcgtgtttagtgggcactgcgctggacttccaaggtgacacggcgtccatgcccttctcgttgctcaacccaggagaggcctgcaggaaccgaacagcacaagcaggtcaggaagcaacaccattaggcgaccagcacctgtgcttagagacaccactgccacccagctgggagccaccagcctcctctcacactgactctccaggcagcaaccatcaccaaccggcctcactgtgccagagaaggctgaggctgccaggaacaaagggaacagcagatcccaggtggaaacccggctctgcctgaagccaaaggcctgaggtcccacctgcagtcctcacagcccatcccaagagccagcatggcatcctgtgagtgagcctctagggacatctcaagtccaccttaagcgatgaccaccaccctagagagctgaccccaaaaggtcaaaagctgaaacacacactccacaccccatgccggcctcacgcacccgggcatgacacaccccctgcaggcacacctcacacaccaccccctgcacacaagtgcacacctgcacacacacctcacatactccctgcacacacacaactgcatgtctgcacacacctcacacactccctgcacatctcacagacccctacacgcacaactcctgcacgcgtgcctcacacacaccctgcatacatgcctcctgcacacacacctcacatatcgcccctgcacacacacctcacatacatcctgcacacatacctcttgcacatatacctgctgcacgcacgctccctgcacacatgctccctgcacgcatgctccccgcacacatgcctgcaaagctgcatcttgcatagagcagacagtgctgcagtcggaagggaccaaacaacattaactggaaagaagatgctagaaaacgtcaatccattagattcactgggctttaagaagcccttccaaccaacttagtaaagaaaattaggaggagatggtccagctcgacacccatcaggctggaaaagagaaggggctggttgccacttgcagtgtacatgccagggctcttgttgagcaccaaggggagtgggcggcagccccaaggctagtctgtctgcacaggtaagggagggacactggtggagactggaagcattctcaatttcccaccgtcatcagccaaatgcaacttccctgtgtgcctgacacccgcacctgcaccatggccagctgccctgcagagaagctctggaacttgaaggggacgtgggcggtctcgtgggggcgcaggtagagctggggggccaggctgccacgcaggtggaacatgtcctcctccaccggtgtgtgcaggccagcagcacccttgaagtccctccactcctgactgtccacgatgacgctgggggaggcagtgtccaggcgtcagggcagttcttcccaggaggacccacaggaggctgcggtcccacccaccgagagcggtgctcagaggagtgggagagagaagtcaaatcgccccggctctcgggcagaattcgagccagctcagcaggggtgccggctgcacccgacacagatctgggctggggcaggacgggcaccactgagacctcacctgagctcggggttgtcgatctccacagtcaccgtgtgctgtgtgttgtgggggttcttaagcacaaactcaaagaactcggcgacccccagcgtggcgtggagcgtgtgctccgtggtgatggccaggctcagcaggctggcgatgctctcggccttcgtgcgttcccggtaggcggcgatgacctgtaggtcccgcaagtgctgtgtgcggacgctctgctgcgccagcagacaagaggacatgggtggacagggtcccaggcacactctcctccacaaggggctattgctggctgcccaccacccgcgatctcagaagaggacatttctccacaagcatcgccaccaccacccccttccttgaccatgtggtctgggtggaactggccggccccgcccaggcatggatctcaggcagtgctggacagagatctgctggctgtgtccctgacacggaggtccacacagcatccctgcctattcctgagagactcttcacagacacgagtctggccccccgcacggtggagaatcagaagtttcaaacaagagaaaagaatggcctcaaaactatggtgacaggcctcaccagccaggtccccaacacaactttgggagccctgcctgggcccagcgtccacaggagaggacatgcccccggcctgctgagtctcggtcacaccgggtcagagtccaggcaagcagcacgctgcctcagcaaggctcagccacccccttgctctgatgccgcagggactcaaggggcttggccagcacacatgggttctacaggttggagactggcctgtttttcctgtgggacttacaagaaaaagtaaggcccactagaggctgccttgcaagatctcaggcctggaaggggccacccccatgccggggagtcagccagcctgcagctactccaagaagccgctgcggccgggcgctgggaaccttctgtctaacacagaggaggctgaggcgtcagagagatgggctgacttcagtgctttcaggatttaactcaaaaggtgaggacaaaatttgatttctggcttaaatgactttggacattcactttccaacatccaaggctctggctgttcctttgcagggggattggagctggcctttcacacttggggcctccatcagaatttcatcctcagagcttttcaggagtggaacctctgacaggctgtgctggacgatggggccagacatgagttaggatgagaaacagggatagggctgagagtggctcctcaattccaagcttatgctgacagagctaaggttatccaggctaggggcctccagaggccacagcttcaagccctgccagctgggagggagggaggaagggagggagggaggtggggtgggtgtcctgaggcctgggaggaggccccagtcatgccctggccctgccctggcctccctctagtccctccctcctccctgaccactgagcccaccagtcctgtgggatcaggccaggcctcctcaccccgtgtcttctcaccatgcctcttcctcgccccatcagactgaactgagcctagggagggaccgaggcgtctgcatccacctttgagcaccaacgccttgctggcagggaggctgagtggcagccctgctgagtttactgtcaggaaaagggccacctctgttcagaccccggcctacctacatgcaagggggaatctcaggagatctttctcaaggcccctgtggttcccgacttctatgaacccaggaggtacaaccattctcacctcccatttcttagtagcaaaatattaaaagttctatttagattttcagccaaaaaggggaatttttctagccagaatgattacattgacaacccaggatatgtcagttgttcacagctctggtccccagacctgggagagcctcagaatcacctgcaaagctttcttcaaacccaggctccaggggtcctgcccacaccaatcagtatcagaatctccaggggtgacgcccaagaactggcttttattaaaagctctccagataattctcacttaaagatttcccccggtggctgaaaaagtccgattttcttatattctgtccccaggatttgggaggaaggtaagagagaatcatgtgggaggcagggaaaggatgtgcacagtgactcagtctgcatggagatcccaggacagtgacagctgaacaaacccttaccaacacgctcgtcccgcgccggcccaagtctcccccggcctcctgcaggcgcacagacctcatccgctccagcttacgcctgcgggtggcatccgactcgcggctgacgtcctggggccccttgccctgccgggcatgggtcagtagcatggcagccagctcactgtccacgtccgccagcttctgtgcttgcaccacgtgttttcctgcgaaagggtcagagcgcgagtcaggtagacgtgcagtgtctgccttccaggagcagacaccagggcaggcctcccaggaccacctatatagggagggagctcaagagtgcggctcatgctttttgcagctccaatctgcagagttctgagatccagataaagatgataactttataccctggtttccacagcatcccctcctttcctcagccttcaaattaaaagcaattctgactctggcccttagatccaacgctgtcaacacaccaccagggggttttctagggaagaaggccacgttctagaagcccatgctctcgggatcttaaagggcccactaatgccttcacccagggctgctggcctcagcccctcggatcaggaatgggggtaaggggttgtccccttggcaggaggccttcagtgagtggggggcaggcgatgaagctcagagcaggcctggcccccaagctcctgctctcaactccatcccagctgaccctggactgcctggcccccaggacagcccgcctcctctggggtggccctactcaaaccagggacacacaatgactcatttagcaaaccaacagaagctgaacagggtcaagcactggcaggcaaaggctcagccactactggatgggccaggcccttccttccgacacagagcaggggcttggggtgtcgggcggggctgtgctgggtgaccaggccacgccaaaggctgacacatgaggctcccagaaaatcgctcagcccggcacaggcagggcagctgagaggcgccccagcttaccagcttagggcctgggtccttcctcactctctggcaccagcagaaacttcccacaggaaaccaatgccagcccgagctctcccagcctggttccacttgtatggggcatgggcaccccctgcagaagcctccacacagtggacagcaacgtgacccccgcctccttctcacaaggaaacagtgccactgtcaggtccctcaccaccatccaattttaacgccggcaaactgctctgcagatgccccgcgtggctcttacaagtctccggcacaggcctggtctgagctacctgcagccacggctgtgagtggagggacctggggcctgcgcaagttggggtttatcatgagctcaagttttcagattgcatcaccccaacaaatacctctcgtggtcccaatgaaaccagaaagaaagttacagagtgaccgtgaaactgcacttggggtaaggcacgaagcactgagaaccttcttaaaatttcgtgcaacttgctaattgcagagccttgcctcatgggtgagacatgtgcttttaagggacacctcctgtcctggtcctgagcaaaacagggtctggaggatcactgacctcagggcctctgattgtctcagcaaggccttctgggttcctgctccctgacagctgagctcctgacctgctgcgcctggaggcagggttttatcaataacctcagcctggctcctggagctcagggacttctctctaaggagctggctctccaccgtactctaggtggtctgtgggaccagctgaggatgaagggcactgaccccagggcagggaatccagattctaagccaagttcaccccttagccacggcactggccaagtcacctgacctctcttcgtctcagtttcttcaaaattacaatgaggaagctggcccagaacaacagactctatctgcctggatcatgaatccctttgagcccctcatgtctgctcccagggagaacatacaagtttacccagagtttcaggggccttgtgggatcctggaagccttgcaggagggaacccaacggcccctcccacctctaactgcccctcccacctctaacaagccacagctccaaggcccagcaacacacaaaagcgcacggcagctgtgaattcacacagatgatctgcaacctctggggaaaatgctccttaaagagcacttcccacttgtaattcaaatgacaagtactttatactcaggtctgtgaggccttacattttaaggggatagaaaaacttcagagcctccctgctgtgaaacacattttcaccaaacccaggtcttcctctccaaaccaggtctttctttcccaagctccataattggcttctttcttctgttcacaacatagggtacttcaacttgttttgaaaatcagtctatgttcctcctgaccttctctccatttctccttcccttgcagatgagcagccaaccagacacaaatgccactggcagggttcccacttctccaaacagcacagtcgcctgcagagcccagcctagagcaccagggtgtgatcaatgtggtggctcggtggggcctgtgggtccacaggggcatctagccagggcaccgagctgcatatggacagcacagtcctgccctagatgcagatgggcattaacagcaccacgaatggtgcgcacacacacacacacacgcaaacacacacacacacgcaaacacacacacacacgcaaacacacacagacacgcacacagacacgcacacacacatgcacacacagacacgcacacgtgcacacatgcagccttccacctctcacacgccattcatgacccacctgcacatggacagcacagtcccgtcctagacgcagaggggcactgacagcaccacgaatggtgcacacacacacacatgcacacacgcatgcacacacacacacacgcagtcttccacctctcacccaccactcacgacccacccacacatgggcccaacagtgtaaactcacgccttgagcttccagtcgtgaggaggctgcctccagagaagcggctggctccatcgtttgagatgacccgagatctggacggtggcaatgtgctacaacctctcactttctgttcacacgggtgacctacatgaaaaacatcccaacataagacatgaaccccaaatgagaatctgatgaaacagatcaacccaccacataagcggctgtggctttcaaatggcctatctacaccctgacacgctaaggccccaccgcctctgttttgaatgttttgcaattgagagacaggtgggagctcgttctgctgcgaactttcagctaggtcttcattctcctgccgtgtcagtggcagcctccgtttcctggtgacgaatgaaagcgtgtggcactcacagttcgctgcacatggattcttacttctggatctctgggtcgcaaggcgggctgcctcacaaactctaacctcggcctctcgatggccacattgatcaaggataggcctgtgtgcatttacacgtgcaaatgtctggctccacacacacccagggtgaaagagcccccataaactggagccttcaccagagttgtgttcataacagaaggctttggcaagcaagtggtgtggcctcgggacaagcgtgtctcacggccggtgggtgtggcaccctacaaacttgcaacttgcaaacctgagtgtcctgggggaagccgtgcttgcccacggcacactctcctgcaaggatgggacccacaacctcggtgtggcctttacttccccaaggggcgaggcagagcaccgccaacgaagctgtgtcccaaaatgaaccacccagggtacgcacaaaatgcttgtgccatcaatttccttaattccgacgaggcagtgttgagtgccctcgggcctgggatgtcctcaccattttcccgggagctgttaaaaacgggaaccccttcccctgggcttcctgcctctctgcatcccttcactcctgcctaccctcagccctaggggagggagggacttccacactggccaggtccctccttggctgcagcagatccacctgctgcgccaggttccttcccctcttgcccgtcagaagctgctgttttcaaggacgagcccagtgctgggagcacgcccacgtgcaggcacctgtggaggtgagccatatcctccgtccaacccaggttctcctggtgacaaaaccagagctggctgacggaggtgtctctctagaatgggtctgagctgaggctggaaagggagtgcccgtcctaccaagggagccaggcaggtctccgagctgctctacctgagttcagcccctctacatcccagggaacagcgcctggattttggaaaggacctgaaagccagatactgaatcgcagctggcgacaccaaagacattggcgggacagcagaccagcccccaaaaagggctgttgagggcaaaggccccgatgtggtggtagagagaggctagatttagaaatcacagactgcctggaatcaatctctagaaaacttctagaagagcttcacttcacagacagatggaaagctggtgacgcagcagcgaacaatccctgctgccctcaaagaactcacattctcctaattcttaagttcctttggtcatcttgagtgctctctccggatctcagtccaagccaggctggccttcctgccacctcctgcagacgagctgttcttggtcatctgtccctgcttcagtctttgtaagctctttcaaaactgaagctccaaaagcaactatggcaaaggcactggcacgttggccgcctcctactgtctgcgcacgagcacaaatgcagaattccctggctcagcgccatccctggaggcagcttgaaagctcactctgggcagctgtagggtcaagccgcctgctcacctgtgctgagaattcggccctcaaggccaggttctgacggccacgctcacagccgtcactgcgaaggatgggaaggctggctgcctcctcccacgccctaggtggcaaccagaaaggccagtggtgcacttacccagccatctctcagtggcgcgcttacccagccatctctcagtggcgcgcttacccagccatctctcagtggcgcgcttacccagccatctctcagtggcgcgcttacccagccatctctcagtggcgcgcttacccagccatctctcagtggcgcgcttacccagccatctctcagtgacgcgcttacccagccatctctcagtggtgcgcttacccagccatctctttccaggggaattaatttcgttcttgccaatgtcccagtagctgacaccccccgcctcttgttctttctccttgacctcgacgtcagcaccatgctgtgcagcaggacagccgtgctgacttccccctcggcccaggtccctgctacatccccataaagacgcagcctccatgtcgcccacatgccctacactgtgcttctgccttcgggctaccaaccgcctcctggcacctgcagcgtccactcagtcctcactccaagccagcttcctgggaacgagcacctagaacaagggctatttcggtcctctccctgttgctctcagaccctccctcctgtcctgcccgccatggccacctctgctcccacatgcttcgcaggggtctccagcttcccctcaagttaaagcctgcaccctcccagtggaggctgcagagcctctgcccaaacaccctcctctcgcctgccaggaatccgtttttggccctgacaactcgtggtcacaggatcaagatcctcgtccctaagaaaggaacccagatcagcgctccttcacacgaacagatgttcatgccccatgatgggctgtatcttctgaagcccaggaagaacagggctcccggtgagaagggcactcaggcttcttatcaacgctttcatcactctctccaccacggcgccaggttcaagggcaaacaccactacaaagaagccacgatcagggtcctcaaagacttcccagattcatgtgggaaaatggcagacaaacaagcaggctggggcgaggaagggacggcagcctgaaccagcccagcctgcctgtgccagggccagagctgcgggcaccagcactgatgttcacactccgggccacgctgccctccacatgacgaggagaaaatgccaccgatgttcacgctccgggccacgctgccctccacatgacgaggagaaagtgccaccgatgttcacgctccgggccacgctgccctccacatgatggggagaaagtgccaccagccccaaagcctcagtttcccactcacaagctcagagttgtcccagcttcttgctgtgtgtttcttcccacgggaattcacagcaggggcagcagctcacgggctggcagtcctggcaagctctctgtcacgtcccgaggacctgctccaagaaggaggggcctcccaggcacccagcacctccattcactgtgggctgcagtgggttcatcctccacccggcacctcccttcactgtgggctgcagtgggttcatcctatacccggggcagcccagaatgctccatagctttctcgaccaccttcatctgatagcgaatggttccctgaatcgcagacgaggcctctggtccacccacatctgactgaagtgggcactggtctattttaagcctgtactatgcaccaccctgagaagtactaagagaccaaggagagtgtggcaaggccaactgggcctggggcaggcgaccagcattcttggagctcagactcgaaggacacctaatgatgacaatggctgcagcgggtgtgaccagcaggacacggaaccctgctgggcttcatgaccgtttcctcttactatatttctacttagggcacatgggaaaataaaccaggtaagctgaatttacacttgcatgctcactcaagaagggaacaagcggcaaaggcactgcatttcatcagggcacaacttggatgttaaattagtgcaggctttcttcaccttccatgaaacaggttacacccgcaccaacacgtttgctgcaggggcaggaattccctccaaacacacagggctcccgatgcagccctgcagctggaccaaagcccgccaccgccaaccgtgtgaccccacagcctggccatctgtcagaacccatcaccacccagttctcctaggatgtcctgtgagaacacagacgcttagcctgtggggccatctgtcctgacgcctgcctcccccaggaaaggtcacagaacacaagtaacacacaagctcccagccgaacccccgtcctactcgacaaccaagatcactgcccaagctcccagccgagcccccgtcctactccacaaccaagatcactgcccaagctcccagccgagcccccgtcctactccacaaccaagatcactgcccaagctcccagccgagcccccgtcctactccacaaccaagatcactgcccaagctcccagccgagcccccgtcctactccacaaccaagatcactgcccaagctcccagccgagcccccgtcctactccacaaccaagatcactgcccaagctcccagccgtcctactccacaaccaagatcactgcccaagctccctgccaaacccccatcctactccacaaccaagatcactgcccaagctcccagccaaacccccatcctactccacaaccaagatcactgcccaagctcccagccgagcccctgtcctactccacgaccaagataactgcccaagctcccagccaaacccgtcctactcgacaaccaagatcactgcccaagctcccagccgaacccgtcctactccacaaccaagatcactgcccaagctcccagccgagcccatcctacgccgcaaccaagatcactgcccaagctcccagccgagcccccgtcctactccacaaccaagatcagtgcccaagctcccagccgagcccctgtcctactccacaaccaagatcactgcccaagctcccagccgaacccccatcctactcgacaaccaagatcactgtccaagctcccagctgaacccccgtcctactcgacaaccaagatcactgcccaagctcccagccaaacccgtcctactccgcaaccaagataagtgcccaagctcccagaaaaacccccgtcctactctacaaccaagatcactgcccaagctcccagccgagcccatcctacgccgcaaccaagatcactgcccaagctcccagccgaacccatcctactccacaaccaagatcactgggatcaaagaaagcaatctggtgcttgctgtccctggacgacaaaagctgaccgaaagacagtgcaaaagaggctgccaaggaaatcagctgtgtgaagcagccaccaagcatgagggcagtcctctccccatcatcagagtcccagggccctgggcccagctggcagacacccatgtccccagccatggcacaggtttccttgcgtggcctcagacaggaacatgcactgtgaatgcagctggcccagagcagaatccaggccgaggccgaggctcaggttctgtcccgtgcggtaaccctgcaggcttccatggccagcacccacgctgctagcagagagacgcctactgtaccacagaatagccagttttatgaagaaagaaaagccataacacctttttttccaaaaaacgcagaactgacggaggagagccaggctcgctgcactgatgcgcagagtgctgcgggtggattcgacctttgtgaaaacctctccctctcccgtcagcgccggagtctcccaggctggctatctcagcctccccttcctatgagcttatctctctcttgcaggcaaagtatgaaaatgacaattggagataacatataatggaggcaatctttcttctgaagataagattttaaaacctggagtcactgcacatttggtggctggagaattaaatataaaaacaaccaactcggtctcagagcagaacgcttcttgcaactcccttagttgcatgagcctttgaataatgcctgctcctcacatgtggctcatttatttctccagaacctaattgagttttgctgtgtccatattgtctatttaccaggccgcctcggatgtacattcgtaaacaggcaggcagagcctccaagtcgacttaacgagctgtgcacttgagcccctccgccaggccccccaccaacctctgcgctgccagcgtcgggtggatgtggcccatggggctctggggtttacaatcaggctgggttctaaggagtggaaaattccctaataaaatagcagacaagtctgaatctcatgcagacagacacagcttcagaaacatcacacggcttagttttattgtgttttcaattctgccctgaaaaatcccaaacgttccagaggaccctcgggaggttcagtgagcttgtcactggccctacagggtcccatgtcggtcctctgccctgaggtgcgcacaggcaggcacccagccttgtgtcccttgacaccccatcagcagcccctatcccagcataggcctcagtcgaagcccctggaacgtcccaggtgggaccctcctgagccacccaacccacctgtcccacccaccacagtcctggacgtggagtgaagtccagggctttgctcaggccctctaacgagcaatcccggggcaccattttctacaaagtcatggtgctgggccgagaagaaatgcgcctcttcactctcctcctcccgggctgcagggaagttaggaacacttcccttgtctgtcctccatcatgaggcacagggaagtctctcctggaacccagtcactgtatttgaggactgtcccggagatcctccagggatagcaacaaacaacaacatgcaggagagcccgagatgactgatgacctctaaccccaatcagaaattcagaatgcaaacaactgggtccaggacagactcagcggccaaggacacaggctccatggccaagctggtgagaattctcccggtttcctcctgggcccgtgaagcccatgatgtggcccctgcccgagggagcccacactctaccagaggggttgggcggccgctggagaaatggcacaaggctggggactcttacccacgttggccaaagtcaggtgcagccggcccttcaccaccgagtggacgccgatgggcttgacgcggccaaaccccagcatgtctccactcaccaccatgttgtcctgctcgtattcagttgccacgacctcaagctcgtgggaggcctgcacagccggccggccttggcggaggagatgctgcagaagagaaaagcgcgttcagaggctggagccggccctgggctgcttccaccagccctgcaggtggaggctgctccccagcccagcaggaaagccactgtgggcgggagggggtgtgcgcaggataagaccctgcaccacgctggggggtgagggggcggcgagccaggcgccaacgtcttaaagcaggactccttattactggggtctttttcacaaagtcttaagtaaagtatgactggatttacccactgaataaataccactgggccctgggaaggcataagtgggtctggcagctgccctggaggatcctcccctccacaggaagcaagagcaggaaagagggcagccaagcaacgcaaaggactcttagccaagcgtgtctgggacagcgaggaatccaggacggaaaccccaatgggactccaggaggaagacaggccatgcacagagagggcaggggaggcagagaaggccggggaggcaggccaggccaagggcacagggcacagggtacagggtacaatgcctcccccgtttccctgggccaggaagcatggctggggtagaggcccgtggggcccagggaggggccatggggcacgagaggcccgccgggagccctgggctggggtttggcccagttctgcatgccaggccgaggctgctcggggcagggtgggagcaggaagcctcagacccagcagggcctcagcaggactttcctgaccacgggctcttctgctgatcagattccacggctcagcactctgcccgaacgccaacactgtgaggcatgtgggggatgacaacggcctcacggctgtgccccaggcgtggctgggacactcttcccccgtgccctctctgctctggtgcttcctctcacataagaagcagtgtgggagcagatgaggttccggattttgtaattctccagtttctacagcaacaaaagtgcctgtctctgggagtgagacgccagacctgacccttcccttgtgggtctgggggcttccggtcgccgcagaccctggtcgctttgccacactcgtctacactgcatacgatcactgcatagacatcgatgattccggaacctcagtcactgggagactgagaagatatgagaagtctcctttagggaacagccaacaaatacaagaaaccatgtcagcttctccaagaggcaaggaaatgcgaatgaaaacaaggcaccattttcctcccaaatcattatcaaaatggccactggcgactggtttaaaggctgacacactgtgaagccaaggacatgggacacagtgccctctgtcttcaggaagtgcaggcctggctgagccttcgggccaaacccccatctggctctgcatgcctgcggccctcacggtggcaccatcagaattctacttccgggaacatgtcattagggagaagaggatggtaaatagcacaagccccggagacagaattaggctaagactctgccctgatgatcatcagtgtgaccctgggcctctgttttctccaccagaaacaaggataaaaacagaactgccccagggctgggctaggggtcacactgaaggcagcacaggagccgtccgtccctagaggaaactcttctcatcgtcgtagcaacgtgttacggccagcacccccaggaaatcaactagaagatgggggtaaaattgaacttcaagaagtccacagcagtgattagcagaaggaaaagccactgtagtgacccgcaacagcaagagctcaaacaagatgaaagctggccccgcctgcagaaagtaagtccaccaaaggctaaccggagcaacctaactctcccaggatctggagtccagaggattctctctgatcatctcagtttttcacgttttctacctaagttttaaagttacaagattttattttagaaaagtgaagctttaaatttaatttattcaagtctatgtcaacaagcgtaacggcacttgtttaaggggctcttcgtgtagggggagatcaaatggcttccgtctccaggtggcacagcaaagagggggcacaaggctcggctgggcacgacaggggagccactgccaccccacacatgcccagcgggacccggctctgcctcccacaccgcctgcctcctttacgcctccccaccatgcagagcctgctggggctgaggcctgtgctagagatgctgtggtgtcgacacacagtcctgccctggggacatcaaagccagcatgggagacggacaagcaagggccacgatgaccctgtggggcccttgccatgaccccaacaggaacagaggcccagggtgaggcatgagaagagcagccaagccctgcggagtccctgccacctgcagaccccaccctgaacgttctgtgcacagcccaccaccctggggggcatccccctcctctagaagtcacagggagcagggatggagcctggatcagtcggtcacacggggagccaagagcagaccatgcctcagaggaagagcagctggaaaaactcccataccccatccccccaccccgagagcacagcgcagctgaaggagcagaggagccgtgcttctcaggggtcagcagctgctggagaggacaggaagccccgggggttcagccgtgtcaggaatccaggaggaaagcagctatgcggcactcaagaaaagtggggaaatctcagagactcaggggctgcaataatgacgccacatcctctcccagctccgtcccgtggcctgagagaagtctcaggacaccatggtagcgtgtgaaactggccccagtccttggcccaagagttgtcatggggtccccttcatacaatggagaaggcttgggaagaattccagggaagacgagtgaaagaatccatggatttaggttttagtatacaaggagaatggaaaaggacaattagtaaaagagattctaattttcaccagaatgagaaaagaacaacacgtcactgaccttaggaatcaggtcacactgcacaccccagtcattcgcgtatccattcattcatcctcaacccacctcggatgcacctgccctcaccacattcaccacatgggaggagatgaagtgacactgcctggtaggtcagtttgcaggagaaatagataactgagtttgatcttaagagtttcttgagcaaacaactagcattatagaattcagacagtgaaaaatcttttcctttcaagaaacagagaatgcagcactatttttaacgagtgaacaaagaaggtcaaacaagtcctgtgcgggatagcgcccgctccttccaagcagacagacgctggaagcgtgactcgtcccatgagggacgcagcacccactgtgcctgtccttccagagagccgctaccttcatctggacggcagcagatccgatgagcagcagggagtctccgtcccagacgtcaatctgcagggtctgcacggccaggtagcgggcaaagcagcgccgctcacctggcttcaggaacccagggcccaccatgtacctcagctggaagccaggagaccctgtcaaagaggcaccaaaggaggccaaaagtaattggagtcattcatcatctttacacttggaagagatttcagctctggtcatgattactaatttctgcttctgtcatagctacagttaataaacacattaatcaaaaacatcataaaatattcaaattaacagaatgaagagtcatgttcagaagactacatttctttcgcatagaaacaataaactcctcccaaaataagatttatggtttcaccaagtccttgtaacagcctaagatggatgggaacaaatgtccttatgaggctggctagggagtttattattctgggcgtgtagaatttaagaaaaaatgtagtctacatctgctgtcaaaactggcatgttcacacacacaggcagagctcaaaccgagatcaggcttagaatgatgtgtgggacacccagcagcccctctcctggccctaaagcaggacggcacctgccccgtgggtatcccgggctcctcccgtgcggtctgccctggtcatcaggctaagagatgggaactggactgcggcccctgccttcatcttcttgaagtgacattatcattaattctaaattgacaaaaatgccattcaaaccatccttagttaaaattcgaggaacagcaatggtgagaagcatttcaaaacaacattatttctctttctatcaataatggtgacaacattcccacagcccccaacgagcagaggaaggagcgaaggtttactcagcacctccagtgccaggccccaagccaggctgaaatttggccacaggtcctctccacccaggctccagccccacaggatgaccacagaccacattccatctgcgtttctcaagaccagaggacaaggagtaagcacaatgtgtccggacaggggacctagggggagcgaagagtgcagggcccagggtgggccccaagggggtggagcaaggacccactgctcaggcccggcgctggccacagcaggagctcacgggggcatcttggggcagaaaggcaaataaggaatctggaggaagaccaaggaggagctggtgattaacatcacgcaagggcaggcatgtccccagtgtggcacctcagaggtgaccagccacacagcccccacccctgcctggactgtggcatctagtgagagctcccagcatgagcgacgcagaagatgggtgatttctgcatttccaactgaggtaccgggatcatcccactggggcttgtcggacagtgggtgagagttgggaggctggtcagaggagcctagaccaggatggccccgtgcctagcatgctcctgccccccactccaggagctctcagcatgctgtcagctctgggatcagtgtctccctgttttgaaacccagagctccttaagggtggggccctgcttgtccagttctcccagcactaccctgtgcagggcctcccacatggtgggggcgcagttatttgtttgctgagtaagtgaattaatggtagcattgaaaggccctggcagtgctggggtatagtggtgacagaatgggggccggtccagcggggcactggaaggagctccccaggagacaagacagagggtcccactgggtcgagctgtgtttgggacgcgcgtactctccccactgcagcctcagacctctcccctccctgtccagctgagacaagtggctcctccgtggccacccctgaggtccaagctccccacagtccaccctgtgtcatttccatcccactcagaagtccaggaagctggcctccaactgaactaagaagactcccaggggcagtggccctgtcctccccaagcccacctcctgcacccccttcacaaacaccacgccccagcccggctggaatcctcactgcttctggggttgaggaaacagaaaacacagtaatggtagaaactaaccactctccattcaaaggcagatccaggcaacgatgaatgagtgacaatctagaagagcagagtggccaactcccacggtggcaggggtgtggggtgcagggatcgaccttaacgcagcaccccagtgacagaaaaaacaacttttcaagtgtatttggaacattaataaaaacgaaccatgtattaggccactgtggggaccagcctcacagggtcggtgggtctctccccgtgtgcggcaacgagagagtgtagaaataaagacacaagacaaagagataaaagaaaagacagctgggcccaggggaccactaccaccaatgcgcagagaccggtagtggccccgaatgtctggttgcgctgttatttattggatacaaagcaaaaggggcagggtaaagtgtgtgagtcatctccaatgataggtaaggtcacgcgggtcacgtgtccactggacagggggacctttcctgcctggcagcccaggcagagagagagaggagacaaagagaaagacagcttacaccattatttctgcatatcagagacttttagtactttcactaattttgctcctgctatctagaaggcagagccaggtggacaggatggaacatgaaggcggactaggagcgtgaccactgaagcacagcatcacagggagacggttaggcctccggataactgcaggcgagcatgactgatgtcaggccctccacaagagatggaggagcagagtcttctctaaactcccccggggaaagagagactccctttcccggtctgctaagtagcgggtgttgttccttgacacttttcgctaccgctagaccatggtccgcctggcaacgggcgtcttcccagacgctggcattacctctagatcaaggagccctctggtggccctgtctgggcataacagaaggctcacactcttgtcttctggtcacttctcactgtgtcccctcagctcctatctctgtatggcctggtttttcctaggttatgaccgtagagcgaggattattataatattggaatacagagtaattgctacaaactaatgattaatgatactcatatataaacacatctaagatctatatctggtataactattcttgttttatattttattatactggaacagctcatgtcctcgttctcttgcctcagcacctggttggcttgccacccacaggccacaaaaaactgcactccataaagtagaaatactacaaataatattctcttaacataatgcaataaactagaaattaatatgccagcctgagcaacatggtgaaaccctatctctacaaaaaacacaaaaactgcccaggcatagtggtgcatgcctgtagccccagctactcatgagactgaggcccatcacttgaacccaggaggtgcaggttgaagtaagctgagatcacgccactgcattccagcctgggctacagagcaagacccagtctcaaaaaaaaaaaaaaaggtaaaattttttaagaaacaaatttgcaacttactcataaataactttctgtcaaagggaaaacacaatcaaaaaagattttctggaaacaataataataatgaaaatactacttatcagtatcaacaatcttaaggcagtaatcacaggaaaattcatagccttgaatcctggtatatccacacaaacaaaagaattaagataaatgaattaagcagctcaaaaaaaaaataggaagatagtaaagaataccaaaaatcaaggagaaatgaggggacggtaaagataaacacaaaatttaatcaattagaaaacaaaacaatagcaaaacccatatgacataaactttaaaattcttcagaaagacacacagtagaaatgaacagatggaaaggcagccttgtcttggaccgtcatctcctcgctcttgtggcactgttcacaatagaaaagacgtggaaccaacccaaatgtccatcaatgatagactggattaagaagatgtggcacatacaccccatggattactatgcagccataaaaaaggatgagttcatgtcctttgtagggacatggatgaagctggaaaccatcattctcagcaaactaccgcaaggacagaaaccaaacaccgcatgttctcactcataggtgggaactgaacaaagagaacacatggacacaggaaggggaacatcacacaccggggcctgtcgtggggtgggggaaggggggagggatagcattaggagatatacctaatgttaaatgatgagttaatgggtgcagcacaccaacatggcacatgtatacaaatgtaacaaacctgcacgttgggcacgtgtaccctagaatttaaagtataattaaaaaaaaatacaaaaattagctgggcatggtggcaggtgcctgtagtcccagctactcaggaggctgaggcaggagaatcacttgaacccgggaggtggaggctgcagtttgccaagatcgcgccactgcactccagcttgggcaacagagtaagacttcgtttcaaacagaaacaaaacaaaacacaacaaaaaaactgcattaagatggacttcacatctatgggactgtaaaaataccacccgttaacgccccattttgacggtgagcaggaggaaaccagcagccccacggattgccagtggccccgggcagcggcacccgagagagggtgtggggcagtgtctgtcaacaccactgaagcctgtgattccattatcccctttccagaaccagaaagaaccaaggttactaattgctgagatagcgaaatactagaaatgacacaaacgtctattaggagaccggctgaataaagagcagcataaccaccccacagagcatgatgcggctaccgtagaaacgggcacaggcgacatctatgcagcccacagagcatgacgcagctaccgtagagacgggcacaggtgacgtctgtgcagcccacagagcatgacgcagctaccgtagagacgggcacaggcgacgtctgcgcagccaaacttgggctatgacattaactgaaaaaagcagggagcagaagagtgtatttggtatgttaccactgaattagaaaacagggaaaataaaatgtaaatgtttgcttatttttgaaaaaacaaatcagtaaaaacactggaagggtcagccagaaacgaaaagtctggttactgttgttaggaggctgggcagggggaggagcccacagggatgaggggagcagggaggcccgagcacacactgggctacggtgttcaactttcaaccatgtaaatagtccaaaaaaattaaaaaggaaagcaaacataaaagtgaaaacaaattaaaataaatgaatcatactgaatatcaaactggagctaagaattattttgagggcttttggtcacactaaaccaattctgaaccctcggtgggacagaggccaaaaggagctgcgaagaatctgacttcagcaggacacgcactgttgacattaagtcaacaattaacatcagcagtgtcattgtgaaaatgcattctatacgttgttaggcaagataaataagtaaatacatgatgagaaaccatgattttctgtgtaagacacatacaaataatagaaggaaatttatgagaaaaattctaaatctgacttaggaagatcaacatgaactcacattttacattttcccagctcttcctggtgaaaggttttgaagcaagaagacccagaatcaaagcaccccatatcctgatctctgaaatgtcatccccattcaggcagaccaggctcctcagagaaacgggccctggctggcggcagggagagcacaagatgagcctggaaccggcactgctccagaaagcaggacgcgctcaaagtccaatcagagccggtgaaaggccggaagggctcccggaataataatgagtgcaaccccatgcatcgatgaagatgcaggagaccgcagccacgctccaaagacaaagcaaaacagccggacacctaacactgggatcccactgctgggctaactattccaccgacttctcactctgaaaactggcaattaaagggaaagaattaaacctttgtcctgtctttgtggagcatgtatatgtagttcatcgcttatcggtagggaaagttcttttttaacaaagaatgtgagctaataaaggcagagcagaccaaatgatagaattagacaaattaccatttcaaaaacaccaattaaataactgacgcaagcaaagctcagcccagggtgttaaaacaagaggtggaaggttgctggggaccagatatttgcatgaagccaaaaaatgtcgccaagaattcttcagtcagttcaaagggaaaaaactctctttctacaggagaaacctgggggtgggcaccttaaccaagcaaccgaatcagcgtcgtaacaatgagatagtctgacattcgcgcctcctgaggtggtgggctgtgaagcacacagcactgacaatgaagtgttcatgctgagatccagaatcaaacagctttcagccgtcgctcccggcattcaagaactacgggggataaagcaacaagttcaacaacatgaagaagcaaccaggtaagcccggaacacgggacgttctgcaagacagctcacttggtctctcctgaaagccagtgtcactggaaaagaatgcaggcgactacgagattaaagtgataattacaaatacaatacaggaaaccgggctggatcccagatcaaaaaaatacacatgggggacaaatggggaaatggtactatgaaatttgtgttatcttaaatgtgatactagaattgcacatatataaaagggtaccttatttttaagagatgcacgttgcttatttagaggtagagtgttaccatgcatgtcaacaacttactttcaaataattcaagataaacagttaagcaatgttccaaaacatggcacggtttctgcaggtggggacatatgggattagggctctcgcagaaggcccgggaaagaggagatccactaaggaagagacggcaaggctgtgctaggtggcccggagcaggactggaggctggtctgatggagatgcctctcggctgggacagcccagggagaggaaatggaccgcgttctttggaagaacagatgctcttggctgatccaaaattcaattacttcagctctcacactgaggagggcccccacaagacaaaaacaccaggaggaacatgttaggaagcaaaaggccaggacaggagcgaagaaaacaaaaagggttgaaggcaccaagcccagggccaaggagggaaccaacacacgcaggggagaccacgccctcggcagagccccccaaaaagtgtaggaagaagaggtgatgagaagaaaggccactcacagctccaaacacccaaacacggagaaaaccactctcgggagccctgggctccttggctcctccaggctcacgggcgtggctgccggaagcttcagttcagtaggaccagcgtgcagggccttggcacgagccccccagcggctctgccgggcagacagccacgcctcagatgccgctctctgagtggatcttcctcctgatcgggacatggcaaaggcctgggaagctggaaccaaggcattctcccatctacgcgcattcactcagacacctgagtctctggcaatgtcaaattttggattctgagaacataattttccttaggacaactattcagggctgggaattggcttgtctaaatttggtgggtatggggccagtgctttaaaatcttacatgtcctattaactctggtgacgggatacggaaagaatgcctatcaattcaaacccacacatgcacacacacacacacacagacaacacactagaaaatgggcaggggacctgaacacatgcctcatgaacgacgatacccctaaggccagcaggcctgtgaaaggcactcggtatcatcaaggaagctccaaccacgagatgcctctacatcaggatggttcaaagaaacaaagaaaaccagcgatcaccacgtgactggcgaggacatggcgctgtctgggctgcctgtctcctgctgatggatgtggaagctggcgcagcacgagggaaacctgcttggcagatccactaaacctaacaacaggtgctgctccacaacccagccgttcactaccaggcatatctctaacacaacggccgtgcgcaccaaaagcacactcgcagcagcactatgcagaagagccaaaaactagaacccattccaacgcctgtttgaatggagaagcatcacagaatcacccgacactgggcttctctacagccaggaaaacagaaacgctactgctatagacagaacagggaccccacagacaagaggccagcaaaagaagtgggattcaaaacagaacataaaacatgatcccaccgaagtccaaaaaggggcaaaactgatgtacagtggcagaattcagaagggtggttcccttgggggaggtgaaggactgcggtgagggaggcctctgcatcctgttccagagccccttccgggctgggaggtggttacgcaggtgtgttcacttggtaaaatttataccttttataaaaattagctcaaaatggatcacagacctaaatgtaaaccacaaaactatacaactcctaggagacgacacagaacaaaatctaggtgacctcagagatggcttttcagatacaacccatgcacaatccatgagagaaataactaatgacctggacttcactaaaatgaaaaacttcactctgccaaacatactggtaagagaataaaaagacaagccatagatagggaaaaaacatttgcaaaatacgtatctgataaaggacttgcatccaaaatataaaaagacatctgttcaggtatctgagcagaaatctcagggaagaagatacacagacagcaaataagcacatgagaagatgctccacatcataggtcactagagaactgcaaattacaacaacaagacaccactgcactgcctgctagagcggctaaaatccaaaccactgacaacaccaaatgctggtgaggatatggagcaaccagaatcctcattcactgctggtgggaatgcaaaatgcccagccactttggaagacagtatggtgactcctaacaaaactaaacatactcttaccacgtgatccagcaatcacactccttggtatttacctgtgagttgaaagattatgtacacacaacaccctgtacacaaatgtttctgacagcttcattcaaaattgccaaaaactgtaaacaaccaagatgcccttcaagaggtgaatggaaaaacaggctgtggcacatacgtgcaatgaagtatcattcagcaatccaatacgtgagtgagcgagacacaaaaagccatggaggaactaaatgcacagtgctggggggaagaaaccagttttgaaaagctacatactacataattccagctgtatgacattctggaagaggcaacatggaaacagtcaaaagaacagtagtgccaggggaggaggggagggctaaataggtggagcgcaggggaggtgtagggccatgaagctattctgtatgatccatcatggtggatccatgatgtcatgtatttgtcaaaaatcacagactgtataatgcagaatgaactttagtgtaaactatgagtttagttcataataattttttaatactggttcatcaattgtaacaaatgttacatttgttacatggtggctcacgcctgtcatctcagcactttgggaggctgaggcaggaggatcacttgagccaaggagttcaacaccagcctgggcaacaaggcaaaaccccatctctacaaaaactacaaaaaaaatattagttgggcatggtggtgcatgcctgtggtcccagctatgtgggggctaaggtgggaggattgtttgggcccaggaggtcgaggctgccatgagccataattgtgccactgcactccagcctgggtgacagagtaagatcctgtctcaaataaaacccaaaaaaaaacaaaaaagaatatgtcacaccaacgcaaaatgttagtaataggggaaactgttggggtggggggaggtcctacgggaactctctgtaccagctactcaatttttctgtaaacctaaaactgatctaaaaaaataaaattactaatttttaaaaataatggaaccatgcactggcaatctgtctttaccgtacgcatgttacagttcaacaacaacaacaaatatcttttaagtgaggcttatgagaggctcagtcctgaactgatgcaactaccaaggccctagggaaccatgcccgtccagggagaaccctcccacaagctgcggctgctgaaggaagcccagacctgcccaggcagagactcagatatgtaagaaattgaaatcagtcgggtggggtttttttggacttcaacttaagaattttggactgtgaattttaattcataatgacaagaaaaatttgattttggagtttcatttctttggacttcaacttgcaaggaaatttaatttggggactttaattcctctctgggaaattcatcatggaaaggggtttatattcaagtcaggagcatctctaagtggttggccttttttattgaatggtctcaacgctatcatttaacttcgttgcagagcctctgatgagctgtgctggataaaatgactggatggaatttggaatgggaaacagagtggggaatgagtcttcagcagtgggtacagaggagccttgagacaaatgcattagtctgatccattttacagccttctggggacatcagttggactgtctaccaaaggcctcaggaggactgaaaaaggaaaggtggttggcttagttgaagtgattcaggaaggttggaaccgccctggtggtgaccagccccctcccccaaagacaaaggccacacccctggttggccataaacgtaatgatgaaggccagtgagttgagaaaaccaaaccctggaaatgctgtaggagcacagccttccctggcttcacacctctatgcaaaggaacttcctgtggcctctctctgcccagcccccatgcctctcagggcaagagcagctcaactgactggggatggggaatagcctaactgagctaactaactaactaggctgctcactcctcctccccactctcttcttttcagatctgcccacaggagagaatgcaacagtccgagatgtgcttccaggcatgcagagaggcgagggctcaccccaggtgcaaagcctgctgctgtctggccaacctccacctgcatcaaaggccatccacatcaggggctggcgccagtgggcacagctggctctcagaccaaccaagtcctacaccctctttatcatgaataaatgcatgataaagaaagtgatattttcatctccgccatctgcctctcttgaccgactgtgcccatggacaagaaacaagaagcatgccctgttgtacctggtgaccctggtgcccaactgtttggttgacccgttctattgttttgtcttctaagcatttacacttatcaaatttttttccttctacttttactgggtttgttctgtctttctccccaaaacttcttaagttgaacaattaaaacaatatcttaaagagtacctttcttcttcaccaacataggcatttaaaactgtaaattcccctgtaattacaattttacttgcatctcctaagttttgatatgcaatattattttgtcattcagttttaaataattacgcatttctattttgaggtcttcattgactcatggaataattagaagcacattttaaaattaaaaaaataaaagcagttcagagtggttgtaggggagggagtgactgacttctgatcttgtggcattatggccagagaaagttataaaattagatttgataccgattctctcagtatagggtgatgcctgcttggtgagctaaaaaatatatatgaatgatgatcagtttttctaagtttcaaagtatgctttaaaataatgcatattctctaaacgggatgtacaggttttctcagatcacctttttaaactgtattttataatatccttattaacttgtttctgtttgatcaatctactgagaagtatgtctagaactcccatgattgtggaggtttgccaatttctccttataagtccatcaagttctcctctctatcttgaggctacgtatgttagaagatcgcggattcagaactgtttcttttcctagtgaattactttcttggttattgtttaccagcctccttgatccctagcgctgcatttgctttgtgtctctgctgtcaggtgccactgttaggctacttcatttgaggtcagcattttaacatcacttttcccatctgccactttctacctcgagaggcggcagtgtttcagaccccagctgggtcccttatgagctgagtcactgaccaagatggggaaactgaccatcaataaaaatatcaacatgtcaggtgtgtttctattcaatgtagcttcaatctattcgtttacaatgatacccgaagaaaaaaaaagtcattagtccccatccttgaaggatgccagggaatcatgtaattacttcagaaattggcaaataaagggaagaatcaagtattatccagcctttcctatacaaactgcacctcaaggtaagcaaaaagttgatgccaggaagtttctggttttggaagcatcccagctaacaaacaagggaggtgttctagaagcagaacgtcacctctgcacaaatgacacagcggtgggcacaatggctgctgacgcaacacaaagagaagcaagcagacgccaagggcgcagcggaggtgcaggaggtggcgcaaacgtcacctgctacaaagaactcttgccaaaaacaaaaaaaagcatctaatcatgcatctagatctaactcccaatttacagctaaagaggggacagaacaacacctttatgttaccaccaggatacaaaaacagaatccagactgtggggtggacgctctacagtacaatgtggcttcttcaataaatacataaaaaagaaacaacagagacaggtacggtggcagcaactgcagacagagactgaagagtcacactgctccatgaccagtatggaccttatttctggacaaacttaaaaaaatgttatgaggttactagcaaaattttaacattggctagatatttgatgatattaggagttattattttagatgggctataccccttaagtttatgtttttcaaatgagaattcctaattttttagatatacataaggaaatattcatacatgaaattatataatgtctgggatttgcttcaaaataaccctggcttgggggaggacgctgggttgggaggcagctgagagctgctggggctaagtgtttgctgcactggtcaccgtatgattctaatgttgcatatgttttaaacttttcatagtaccacttatttaataacactgacaatttacacacacaactcagtacagaatgtcttgcctttgccatgcacatgagtactcaccagcatcaaaggtgccatctctgctcacaggcacgaggatgtgggtcagggcgccagagctgggctggccggcctcatccagctggaccagctgcagtcgtggcgtcgttgcgggtgggaagcggtagaactggaaggtgaaatacacagtctttggccatgatgttcctcggcagtcctgggccactctgaatccaacaacagctctgggttaactgagtatccatggcacagaacctgaggggtctaatgtgtgtttgcataggggatggtccaggcaccttagtcgctggggaacagtaaagaggctgccgtggtcaccaatgcaaccgctttgctgtgctctcagcaagccggccagacagcagcattctcgagtgtaaggacactcccggctagagaagctgcctttggagctacactaagatctaagacctggacaacccaccgtccacattttaatgaaggaccacaaaagatggggtaaagcagctttcacagcatttagcatgctgtgggtgggtcctagccaagagaagataaaaacagatggcactcccgaatctactaagacctcagcacagacagttctgccaggtcagaacctcagcgaagtttctcttcaacacaggaaatgtgaaagccagatgagtaacagaatattcaaggatttacctgctaaaggcaagaaactgtagcaccatctcgttgctttgtagacaatctgattcttccttctgagggttaaacgtcacaggttctgtagcgctgacagcctcggctggctgtttattggcatccagaatctcgggaaagccggaggactgcaggagcaccatggaggctctcgagggctgccctgcagagctgagacacagagactcctcaggtagcctcccgggaaaggggggacccattgatgcacctccctgtggaaaccctggggttcacaaggtccaacagtctgacggcacagcacgtgactggttccatcccacccagacccacacctcacctcctggtctgggttcccacaacaataggggcatgcaaaggcgtgaacggcagctcctgtaactgttcggcaatggatgtttccaggaccagggaggtctggctcaggtcggcttccaggtgggagataccggcctccaacgggaactcctgctgaacaaaacgagggcttccaagtgaggccaccaaggaccccaacccgtaacaaccaacggtgctcagatctaaggggattcatcgattaattgcctctggagggttgccagctctagcaaatacaaaaggttcaattacacttgaatttcaggtaaacaacaaatgattttagtataagtatggtccctacgatatttgggatatacttacactaaaaaattatttgttgtgtacctgaggttcaaatttaactgggcatcctatatttcacgtggcaatccaatgtgtgagttgagaagcggtgaggagggaatcctaattttatgagcaggtcaggaccgtgggagatacctgacacctgagatggtaaattcatatcaaagcatgtttatagaacagaaagatgaagcttcctcaatactccaagataaactgtggcaccgagcccctggctggcgtgtttggacagtctcttgtccccacagcccctgaaacttcttgtcattcactcgtattccacctccactcccctccaaggccgaggcaggcctctcagagaggagctggcttgggagttgggaatgtgctctctcaagcttcattcccaagctttctgtttcagcccagaggaaaccaggtcaccctcacaccatgtctcatgcgccaataataaaaagctaggcaagctcttcacaaacacatgagccccagagatgctttagataaagcagcagagactcatggtgctaggagtgttttcaaacaaggaattaaaagaaactatttttcctcaacataattccagttaagaccaaagatgcagtttgcaggtgaaccagccgactttggaaaccaaactccataggaattccccaaggccagtggcaatgccagtcttagccaggagcacaccctgaagccaggatggcgggctccactcacctcctttagctgctgatagcaaggagggtcctggggtgctgggtgcctgtctcagcctgtctatagatatagccacaccttccttttactttcacgtagagacctaggggtagcttaactttgttttcatgggtagagcacaatctgagtcaagcgctgtggtatgaagaactcatgggccacattcttctttggtctccaagacagaatggtgacaactgtctgaggcctcagagtaagcaatgccccactcccacccacatcccaggtaacccgccaaggtctctgccacctaactaaggacaggcacagtgcaaaaacccaaaatgaggagctgtggagccattccttggtggaaggcaaggcggcaggtgggcggcacttactgcctgggccggggaggcctgagagccatggggtagctgtgaagtaggcctggccaagcagtgctgagtcggggaccgcggggaggccgccagctgggaaattgacaactggaaggaaagagagcacaggtgaggggctcagaagcttgccagtccgtccacaaagctcccaacatgcactggccacaccggggaacggggtagccctggatccagccacggaagggagtgatgcctgcagcctcctggccagggcagctctggaacctgggaccgcttctcaagttcctttatttaatgacagagaggtgattccatgatctcccccagatcataatatctgaataagaatattattaacaaggaaaacaagcaagaaaggagaaagcatctcaagctacaggggcggcctggcctctgcctctctgtcccttgccagcactggactgagcacctccaaggccctgccagttctagccgcctgcgttcctatcgaacaaacctccctgttaaggcaatgaccatcttgatggccagcgcgggctctggagacagctgtggatagagtgcccgtgccaacgtggcattaccgtggagtgcccgcaccaatgtggcattactgtgtagcctcaggcaagtcagctaacctctttttgcctcagtctcctcacctgtaaaatgggggtaataatagtacctaaactgcaggactgttaggagaattaaatgacaatcctggctagggtttggcatagtacctggcacacggtgagccttctataaatactgcagatatttggaaatgagtgcggcttaaaacactgatgcggagggctgggggcccacgcactactgaagacacagatctcaaacccggactctaactccagtacacacagccagcacctgagacattcactgtcagcaatgatggctggcccacaccaggtgctggcagagaggccccaatgtatgaagaggcactgaggaatgaatggggggcggggtgcatgaagcatccccaggggaccctggcagcatcttcagggagcagaggagatctttggggcctacccagcttccctcagaccctatacggtatcgtgaccactcggggtcacgtggaaactgctccagggaaaatgccaggttgggccagcagggaagcctgggaggccgtccacagacttgcgcctttaggtgaatccagtattcttcactcctgatccagtttcccactgcagatgacacactaaagctgcttccttggagacagccatggatactgaattagtcaacttttctagaaagtcaatttccaggatgatgctggcagacaaagtcatcagcaggaacaagccacatctgacctcactgcaaatcacatagctaaggccagccttggagccacaggtgagcgccacgggtgtctcgggactccagaacggcagccaagcaggagctcagctcagaccgctggcgggcaacggcccagcgggaaggcgcctctcctcccactcaggaagttccagcgccacggggatctgtgcggtcggacgtgcaactgccagcagcttgtggttctcagcagtgccactgtctccaccagcatcggctgcttggccgacagggccaggggacaccaatagctgccaggcaccgctactggtggagttagtctgggagagcaaagagggtgaggaccacacctcgatgtctctcagaaaaagcaaaggccgtccagtcctgagagttgccaccatgagatgcagctgccagggagatgtggagacgccccatacagcagcataggggttgcaagcagcagccccactaaaagcccgcactgggagtcagaacatcagggacaggctgcacagacagggtaggaggggacagccccgccgccgccagcaggccctccccagccacgcagaagcacgcagggatccactgtgcttaaggggggacagagggttttcttgcaagtaattgactctggaattctgaaggaggccgtggggggcctggacttacccctggtcccacaggtgagttctgcggggcagcgagaactcgaggtactggcgctggcgggcctgggaggaagcacagtggggtaggagagggaatgtgtcagcctgtgttgggggcagtgggcccctgaacccccacgcagtcaggtctccacaggcctcaccaccttgtctgtaacaggggcagccgctggttaccgttcaggggcaacagcagcaagggtgccacccaaaagtgtcgctgtctatctagagccctggcatgcaccagcagccaggagagggggtacagctggcctcgtcctcactgttcttcctgggccagcaggtctcacagcttggggtgcttggagctccctaacacgcttctcctcactagtcatctttgcatcttccctgcccggaagagctggggtctgaggttgccccagtcttgcagctccctgactccggctgttttgttaaccgagaagctcctgagcagacactgccaacctggcttgcggcctcacgaacacccactaagcacaagctgtccgccaggtcctgctgaggattctccatgcaggcccggtaacactgggaggcgcacctgggggaggcaaggccagcccttcatggggtccccctggagccagggactgagaactgccttggccctttataaggccacagctgcctcccaagcatccaggggctgcctaaagagccagcagcctcctcccagggccacctgtacctgcccagccccgcctcagcccagctggcatttgtgctgcttctgcaacccctccccaggccacatggacacctcatggcccagcagacccagggctctcagcccctgcacctcagcaggaggaagccccagcatcgctggagtctctgaaacccaccaggctcctgccacagcggtgctggagcgtccatagccactcgtctcttacggtcatttcacatacactgccatttgcctttgcccaccatgaaaccaccaagccagaccccaagcccatcctgacggggccacctctgcccactcagaggccagggtgggagccctgcacactgagtcatctgcctggcttccctgaggcccacagcccagtctccagcccatgtcctgtccccacctggctcatgacagcctccttcacggtgacaggactctccactgcagcagacactaccactccccatcggacttccaggataacccagacctccggagaaatcaggcttcccccatggccctgtcccacctcccgtcacccccatgtggcccacatcttgggcccagcagctcgccttccctccctctcctgtggcctctgctgccatgaaggttgggcaaacgaatctcctatatgtcctggtatcctgaattcctatggcacagagcacaggccggcacttacgggacctacggaccaagcacacagcacagaggcctgtgacgtcaaacgctgggcactctggatagagactgctcagccacttcgtgttccgctctgaatcccaaaaaaacaaaaacaacaaggaaaatgctgtcgaccaaggagaaaccaaatccagaaagtgccgccctaacaccagagctgcacgaccatcggagccaatccccgccgtgcctctcccagcagcttccagaacccatccaaggaggtgcttccccagctgcaggatctggtggaaaccctgctaagggcctgtggatgggtggaaggcattggggcaaggccagagggagcccccaaccctcagaggatccaactgcccagcctggcgggcacagctcccagtccaactacctcctgggcagcgcccatttggcccgcgcagctcctctgtaaccagccacagtaacgtggctccaaggagcacaaagactctggtcagaggaacctgcccttctataaatgagctcacgtgctcggagggagttagcaaatgatctagcaagctctgcttccccaggaaaatatcatctcactaaaagcaaaatgcagatgaggattctgcaggggcccagctgtcctcaaagccgatgcctctccccagattccctgagtgcctcttacagtccatttcagagctccgtacggcaaacccctgcccacctcctcccagaaaaagcctgaaagatgacacagcagagtggtaagtgaagctccacgccgttcctccgtaaatgggaactcggaaaactccgcaggctgattttgataatgaggacaaattgccagaaatggctccattatcttcagcagagacagcgggcactcgggggccagccctccgtgcctgtgtgcgtcctcttggggaggaaaagctggatgaaaagttaaaccttccaagcacatctgaacttctcgcatgcattttatttccccatcgtctcaaatttgcatacagtgtggaaagttttttcaagtaactctttatatcatgacttatgcaattttttcttccaagagagtaaacctacctacaaggccatttaaaaaggccattaaaggtggccatttaaaaagatacctggtgggaagcccagacccccagggcccaaaactcagatccaaccggtgaagcagagcaggaagagacacaccaaggccacgaaataactcagtttcgaatctctttgttttaatgttcgatgtggttatgggttaaggtgcttcccaaactatactcatagtcctgcccagaggacagcgcggccgccagggagcacccgctgtactccaggccccaggagtcttccaaaaaccacggtggagtctgggaagcctgacttccgccacataacaggacttggctgacaagcacctgggccagcaactgaaccgggagcagcatgcgtgtgcacaggacacaggtaggagcagctgcggtgagcagacagacgagcacaaggctgtctggggcagcgctgcgacaacagcaaaacattagacacaatcctggtgctcctgcaaatggaagctacctcagcagaacccggcagatcctgcgtggggcaggggagcaatgggatgggaggagaccagccggtgtgtgcagaactgggaaggcagccgcggcaagttaaaaagtgacgataggccgggcacggtggctcacgcctgtaatcccagcactttgggaggccgaggcgggtggatcacaaggtcaggagatcgagaccatcctggctaacacggtgaaaccccatctctactaaaaatacaaaaaattagccgggtatggtggtgggcacctgtagtcccagctactcaggaggctgaggcaggagaatggcgtgaacccgggaggcggagctttcggtgagccgagatcgcgccactgcactccagcctgggcaacacagtgagactccgtctcaaaaaaaaaaaaaaaaaagaaaaaagaaaaaagaaaaatgaaagaaacccacagtgtatacgggtgtgctggcaaactcgtggtaaccacacccatgagacatgctaggaaacgcgtattcctacattgcccataaaacttaaagtaaattaaatgttagtttaacagtcattataagacacacctgtaggtccctgatggagcctgaagtagtaacacagtcagcacagaatggaaagctgagacctccacggcaagcagcatgaccaggtgcctctcccaacacggagcccctccgttctcacccctgcggcagaggcctgggctccctcactgggaggggaatcagcgtctggctgagccaccacaggaccctggtttcagggaaataacctggcgttaagaagaagagcacagagcctggccaacgtggtgaagccccgtctctactaaaaatacaaaaattagccagacatggtggcacgcgcctgtaatcctagctactcgggaggctgaggcagaagaattgcttgaacccaggaggcggaggttgcaatgagcagagatcgcgccactgcactccaacctgggcaaaaagagtgagactccatctcaaaaaaaaaaaaaaaaaaaagcacagagactcagctcttccacggctgctccaagaagctcgtggccagcggggccctgagatggggttgccagcacacacctctggcccagagccagatctgagaagagcaggaagagactaagtcactggtttcccaggacaccagaaccaactgtgatccagaaatggtccacatggattgctagagacaaagaaaaacttagacttcccaccacggcaggtttctccacctctctgaagattccttttccctgacgctctatcactctccaatcagtctccacttgctgaaaaccacagtcaacaaaatctcaaatgtctacttttctgtcaatttagcttcaagaaactcaaaagccctgcactcaactacagcacaggcctcaggaggcaaggcagggcctgcactctgatcccaaccccgggaggccacgcatcccacctggtcactgccaacgtcttcacactgcctctgcactcgcctggagggggccctgcaagaggatgcaacccacacacattccacacgcaagagagacaggcatgccctcaagcccatggctctcagcactgtgggtgagttgaactgcagaagttgtacagtgaacaaataatgctcaaatatactcacagggacaatattccccagaattcctccttcctccaccccgaaggagatcattctatacataacgcagagaacagaaaagaacattgttacccagagtaataataccactaacatcacagcccagaacagaggaaggagctctccagccaaccccatggccgccaggcacgcagctccccgcaaagtaagtacactgggcttcgcttcttcatcacgcacgcgggccaggacatgaacagggatagggctggggcaggaggcggcctccccaccaacaaccctctctcacttccagcgtcacctcaccagacagattaaaagtactgactaccagctggacatggtagctcatgcctataatcccagcactttgggaggccaaggcaggaggactgttttgagtccagaagttcgagattagcctgggcaacatggcaaaatcttatctatacaaaaaaaaaaaaaaaaaaaaaaaaaaaaaggcctggtgtggtggcatgcacctgtggtcccagctacatgggaggcagaagtgggaagatcacttgggcctggaaggtggaagccacagtgagccgtgactacgccattgcactccagcctggacaacagagtgagatcttctctcaaaaaaataaaaagtactgactacacaagggagtcccggcactgccaggctgcggtgtccatgtcctgacctagggtttcactgagcagctatctgtcgcctcaagccacataacttttcaatatgcatgcgcattgccaattaaaaagtgaaaatagaagcaaggggaaaggaaggacatgttttcaccacctttactttcccacgtccatagattcattttccaacaaacattttatcagatgcctgcgctatgacaggaccacagaaagaaatgaagataaggaaacagctcagtggaggacggggctgtggtcttcattgagatgtcttcctaggctgaagggagcaggggcctctcaacatcaggacacatgcatggaggccaacgtgtcctttctggaaatgtgaacggggtcgtgaatgcggtccccacagcaccagtcccctgtggcccgactgccccagcaggtgccaggtagacctcccccccgcaccctgaaacgcacctgtcctcctgggcctagctgtgctgccagcctgccactgagcaaacaggggtcagcagagggctggatgaggggtcctaacagaggaaaatgctcatttcgctgagcaactgcccagctgagcaaagctgcctgcatttacctatggggtcagcaattccgtgggagagagaagtcctgagggaggagggagagggggcagcacgcagaggctgttgcttagcaactcatggcagctggtggaaggcagggacgggccaggccttgggccttgggccttgggccttgggggtagactgtggccctgttacaaacaggggtaaacagatggccccaaaaggcaggggaaaggaaggaccatcgctagtaaagatgcagtctctggggtttgaagaagggttgcaaaaagtagcttcctttcatcaggccgtgaaaataaaggatgagtcagtatctagtggtactctagacactaagaattcacatggcaaacccacttgaaaggcctttattcctaactatttgtaggtaaaaagtcattgttcctaagagtttgaaaacaggaatgggaaaatgaacaaaacctaagcagagatcaaggggcaactggatgatgagtgagcacaggactctgtgctgcaggagtccagatcccaggcagcccaggactgcaggagtccagatcgcaggcagcccagaacaggagctggttcagcaggcccaagccgagtggggagttccgtgacttgccagagccctgagctggggtcacctccagggtcagtttcagaagtgtcacctcccttgtcaaagccttgctctgacccactgtcccactaattctccagcaaaatgcacccttaccacctgcacacgaacttccattccgtggttggagggtggccaaaaagctgctccatggccttagactctcccccaccaccatgtgattgactgaaccaccctcacccaggacaagggagctgctgtctgtcggagaggatgttccagaccagctagcagcacagcaggcaccacggggcaggaatctaactccacgtgtcctgggaaacaccacaattacatgtttgcaatgaccccttctacatggctgttttcaaatctattaagcaaacaaaccaaaattctgacaccaccagaggaacattcaaaagcaaaatataggtcagggaaattccaagttacaaaaaaataaagactgagtgccctctagcggctcaatgcacactcttctgtggtaagtgatgaatgaaactttgctcccttgcaatgttacagagaaaataaaaaggattattcataaccgagagccaaagtacctcacttaaagtgacagccgcatatcattaagatctccaaaggaaccatataagttggtgaaatactgaagtatgaaaagtttccatcataagttaaacactagtgggtatttaaaagtctcttacattgggttttgagaggcaatgtcttccaatgcttggaacctgggctgaaggtaatcatttaatgtgacatgaatgcagccataaatccaaattaaataaactcagtgaaatcagggtccatccatgtagatttgctggtccccaaacagtgactgagaagtagattatgctgctacagctcatttgcaccaccgttcaactcctggtccttccagtaaccaaggcacactcctctctgccaaggatatgacagtaaatcttctggtgaggaactcaaagcatggttccccacagctctgcatcttaagaagtcaagctaggccgggtgcagtggctcatgcctgtaatcccagcattctggggccaaggtgggcggatcacctgaggtcaggagttcaagagcagcctggccaacatggcgaaaccccatctctactaaaagcacagcaggcttctagaaggaggacaggctgcttcttacctgtcttcgtccttctcaaacaaaagaaagagtcacaggaactactcaagtctatgcattcactgacggcaaaatgcaagaatagctgggcaaagctggaatgcaagagtgcagccaaagcggcagtggcagggaaagaccctggactgggatcgggagaccaggagccccaacccagaggcagccactatctgtcaacttcaccgaccctgaatccgtactctcttctggtggttttcctttagggaatcaccctcccagcccttaaccatacagtcaggggtggccccaacccccacaccaagaagggtgtgtgaccaaggccaactgtccccacccccatccccatcaggtgttacacagtaaagacaggaggactcccactggaacaactgagtcaatcagggcctttctgttgggattcctaagcccaggattacctgggagctcctgggctcaccatgtggagaaactctacccggaaagaagccaacactgaagaaaggagagcttaaaggggaggggagggggtaggggcatgagggagagagacgaacagatggagtcttaatggcatcctttgagtgccgggatccagccatgcctaacatcagctctacctctaggcttttctgacacatgagccaatacattctctcttgttgaagctattttgagtcaggtttctatcccttgtatacaaaagggttttgattaattcattcactctacaaatatgtactgaatgttttactgtgggccaggactcatcaggcaatgtacagatgaatgaaacagtccccaccgtgagctgcttcaatgataagactcttcagtgtggagcaaataaatgcaccaactatctgcacctctttaccttccaggcatacgatgagtcagtccccagtccccttgtgacttgggaggccacgtggctacttctaacccgggagggggagaagtgacgtgtgccatttctgggccagagccgtaactgatggtacaagatcctccccaaggcctccccttcctactggcgcaacccagcaatattcaagatggcgaacaccctctgggaccaggacgagcagagccaccaccaactgcaatgcgcacgcagcgagagtgagaaataaacctttttattttaagctaccgagatctggagattatttgttaccatagcaaattcgactaataccctctaagaacagtagcagggaaggaaggaatcagacaacacacaaggatataaaataaaaggtggtgtctgcaaagggctgtgggatgctgaaaacaaagctctgccatggacaagacccttaggcagggctttacagataagtacaggtttccataagagagggcaaggaaagtttaatatatgcctttttaaatgtgggaatatttaaagacattttcaagttgtaggtaaaaaggaaataaaaatggaactcaacaatgtaggaaataacattccaaatcaaaacctatgaaatggggtaaaagatgtacttggaagaaaattgcagaatcttaaatgattttattattaaacacgatgagcaaataagctaagaattctgcttttcaaagaggatgaataaagataaaatatagaattaaattaagattaaagaaaaaattaataacttaaaaacaagagaaccagtaagtaaaagtaacagctgattctttgaagagactaatgaaatatacaaacctctcataagcctgaccgaaaaaggaagagtcctcccaagatagaaagcgaaggaaggaatctaatcacaggcgcatactgaatgtttaaattagttacaaactttatcacagcatccttgtaaactagaggaaattggccattttttttagaggatgtgtatcccaaaagttaacacaagatgaagtggaaaacataaatagaccaataaccatgaaaagaaatgtaattggttgtcaaaaatcccttcagtggtttcacagagaagttttatcagaccttcaagaaacaggtcttgccttttgtttaaactattttaaagcccagaaaaaaatgggcagcttcctctggattatgacataagagaaagctgcagatcaggggtctgcaaactatggtccacaggtcgattcagctaacaatctgtgcgtatcaacaaagtctcattagaacacagccacgtccattcattaacgtatcgcctatatataccagcggagatgagtagctgtgacagagaccatcttgcccacaaatcctaaaatacttactatttggcctttacagaaaaagtttgctgacctcttctataattgggcctcaattgtagaaacagaaatcccaaatacaagttaatcacatcaagatggacataactgtaaaactccccacaagtcattctctcttttttaatactttttttgaacagttttttaggttctcagcagtactgagcagaaggtacagggtgttcccacagtgccctgtccccacatgcagctaccctcactaacatcccagagcagatggcacgtgattcttcttgctacctcacgtatttggtagtttgtttattgtctgtttttaaagctccactgggacaggagcctaaccaagtgcctggcacatcacagactctccgcaagtctttgctgaatggagagtgggtaggagaaaaggaggaccacctgaacaagccccatctgagtcagcatgccctaaagtgtttgcagaatggctaagataaaatggtagaggcatagccaacactgagctttctgggcccacccggaacctactttcgtggatgcagtcagggccagctgtgtttgtttgtttgtgggttttttttgtttttttttttagaggcaaagtctggctctgatgcccaggctagagtacagtgacgtgatcatagttcactgcagcctcgaattcctgggttcaagcaattctcctgcctcagcctcccaagtagctgagactacaggcacatgctaccacacccagctactgcatgcatttatttacttatctatctatctacctatctatctagagacagagtctcactctatcgtccaggctggagtgcagtggtgcaatctcggctcactgcaacctctgactcccaggttcaagagatctcttgccccagcctcccgagtagctgggactacaggcgcgtgccaccacgccagctgattttttgtatttttagtagagatagggtttcaccatgttagccaggatggtctcaatctcctgaacctcatgatatgcccgcctgaacctcccaaagtgctgggattacaggcatgagccaccgcgcccggccttaagttttttgtagagtcagggccttgctatgttacccaggctgatctcgaactcttggcttcaagccatcctcccacctcagcctcccaacatgctgggattataggcatgagccactgcgcccagccggggttagctgttttcacccatcaaagactctggggtccagaggagctccgtagagatgtgctccagctgctcctgccctggcggccccgtgttaattgaaccagtagttgaaggggtacgtacatgtggtcgcttccctcaacgctgccaaccagaagaaccacaatggcagtggcatggggacaacgttaatgatcgcccgacaatcgctgggcatctgctccacgccaggcagccccgagcacctggacatatctttactcatttcatcctccccccaatccttggctatcctttgcccatttttcttttctgttgtttatctgcttcttattgatttggaggaggtctttctgtaatccttctttctaatcttctcatcttacttccttcattaatttttaatggtcatatgtattgcaaatatctttcagcctgaggtctgtcttctaactttgtttacagagtcttttctcacacagaagttttatattttaatataatcttatttctcaatcgtctctttggtttatgctttgtctatcttgcttaagaaggccttcctaacccaaaggccataaaaatattctccaatgtctttttctaagatttctcaagtttgtttttcatactttaagtatttaatccatcccattttacagctgaggaaacagggacacagacattaagtaactgctctaatattcaataagtatgcattcataagcaatacatgcaattgttttgaaagttacttaaatgctaccacattgttcatttcctttcagaacttgtgttcattcaacatgcctttgtgaaggtttatccacctgatacgcatagatctatttcattcatttaaccgacacacagcatttcactgtccaagtaagtcagtttatccattccctgactgggaaaccagcagctgctgtgatgctgagcccgcccatgtctccttatacacatgaaccggttgttctctctaacagtcgtctggaaatggcacttctgagttgtaggatattaactaaatattacaaaatcactcttcaaagcggctgcacacatcccattcttcccacggtggtaagagttctgctttatccacatcctcaggaacttttgcactattagacatctggattcctccaatatgaggggaataaaacggtttgtcattttattttcatttctctgattaccagtaatactgagcatgttttcatttgtttatggttattggttattctggtttcttctctataaattccctcttcatatgacgacagcgttagcgatcgcccagcaactgctgagcactgtccatttttctttcctgctgtctatttcttattgatttggaggacttctttctataatctttcctctttctgatcttctaattctaacatttctgaagttttggtttttaggccatctggaatttattattgtacatgacatgaagctaggactgaattttatattttccatgtgggcaagggatcacgccacaccatttactgactgctactccttgcggtaagcggagtaactgctgccaccccagagatacccacgtcctaaccccagaacctatacatatgttcaatgccaagggactaaggtgctcatcagctgaccctgagatggggggatgaccctggattatccaggtgggcccaatgtactcacaatagtctttgtaagtgaaaggcagggaggcaggagggtcagagttcagtgacaactggaaagtgctacatggctgcctttgaagatggaagaaggagccaagggacgcaggtggcctctagcagctggaaaaggagaggaaatggattttcccctggagcctccagaaggagcacagccccgctgagccctcgatttaagactataggacccactttggacttctgacctccagaattttaggataataagctcctgttgcaacgtcactaatttgttgtaacagcaaccagaaactaatatattccttctcttcaagttgtcacatatcacactttatattttgtcccattatctatttatctctctctgtatcaatgctatacttgttctagaaattagaacattacagtaagtctgaaaactaagaaaggtgaagcctccctccttcttcaaaattgccttggctattcttgactatggtttttttttttaattaaaaaataaccccagcattttgggaggccaaggtgggaggaccacttgaggccaggagttcaagagcagcctgtacaacacagcaagaccatatctctacaaaacaaaaaacttagccaggcacggtggcactgtctgcagtcctggcttagccgggcacggtggcactgcctgcagtcctggcttagccgggcacggtggcactgcctgcagtcctggcttagccgggcacggtggcactgcctgcagtcctggcttagccgggcacggtggcactgcctgcagtcctggcttagccgggcacggtggcactccctgtagtcctggctactcaggaggctgaggcgggtggattgcttgagctcaggagttcaaggctacagtgagctgtgattatggcacgcactccagccagagcaacgaagtgagaatttatctctaaaagcaaaacaaaacaaaaaccctggaatatatcctaaaagaaaataaatgcagcgtatgggagaaagacacaccaggcggagagcatgagccaagactcaaaagtccggaaaacacgcagcatggtgagtgaatcacaagtagcacacacagctagaagacgctttcaaaccccgggatgatcggccccggtggggatgatttcagcagccaagagactattaacaggacttctacttctggccaagaagagtaacagtgatcagattgaccctcccatctaaaatacattttcttttaaacacaaaatatgtagaacagtggttttcaagacagtggacttcaggcaacaaaggagagtgatcccaagggctgggaaacagaagagggaaggcctaccctgaccccagcttactgtgttcagtgagtttgcaccagacaggatgagcagcacagagagagaatgccagccatttacagagggtcccaccctagcattcagtagagcgcggatcaggaaacttcctaaggccaaaagagaaagaaccaccagagaggattacagggaatagggcctggtcttcacagggcaggcagacatagcgctgttccctccagccacctggtaatcctcattcttcatgggacaccgggcagagccctctgggggcacctgtcatctcagtgaggaataatcagccctagatgaaatgctgatctgatctcacctaaccaatcttaagagcaagacccaaaaggatctaacaattttcaaagcttaagaatatttatcagatacaaaaacattcagtatccagtaagagaaaattctcagtatctggagcccatcaaaagttatcagacatccaaagaggcaggaaaacagaacccaatcaggacaaaaatctatcaatcaaaactgatcctgaactgacaaagatattagaattagcaagccaggatattaaagtagttataactgtatttcttaagttcaaaaagccagaggaaacactgaacatgttaagtcaagacacggaagaataaaacaagcccagacgaacttctagagatgaaaactataatatctgagatgaaaagtatactgaaaaggataaatggcagatcagacactccagaagaaaagaacttgaagtgaacttgaagacagaaactatctaaaatgaaacacacagcaaaaggaggttatgaataaaagtgaacagagtatcagcgagctgtgaggcaatttctggcagcctgataaacacgtaactggggcctctgaatgagaggatgagagagaaagacagaagaaatatgtgaagaaataatgaccacaatttttccaaatgtgatgaaaactataaatctagagatctaagaagctcaaggaaccctggcaaaaaaatcagttaaagaatcattctgggcaagcagaggcagtggcagactggttttaaaatctcctccaaacgcctcatgaaaacagggcagccagggaagtaaaaccaaagcccacagatggcatccacaaattgatccagcccaaaagcccgacagcaggatcagcccatcagagtttatagttaatttgattagaaggtcttcaaaacataactagctgctcttttccagtgccataactatatctttatttacttatttatttttgagacaaggtctcactcttttgcccaggctggagtgcactggcgtaatcacggctcactgcagcctccatctcccgggctcaaccaatcctcttgccttggcctcctgagtagcggggactaaaggtgcacaccaccgcgcatagctaatttgttttatttttagtagaaatggggtcttgctatgttgcccaggctggtcttgaactcctgagctcaagtgatcctcctgcctcagccttctaaagtgctaggattacatgcatgagccaccatgcctggcctgtatcataatttaaacacatgaaaatttctttccagagaaggtagtcatatttttcctgaaagctagctatacaggttcattctctgttcaggcatttctacagacatgggcaaactatgtttattatgtattactactgtacttctaagtaacttaatcaaaaatcagagtacagagtggatccatgggttctgcatccatgaattcaaccagccttggattgaaaatattttttaaaaaatggatggttgtatctgcactgaacacgtacagactctttttttcttgtcattattccctaaacagtacaatgatttacatagcatttgcactgtattaggtattgtaagtagcctaaagatgatttaaagtacagaggaggatgtgcgtagattacaggcaaataccacaccattttatataagggacttgagcatgtggaaccagtcccccacggataccgagggataactctaatcatgtttgtatttaattacaaaatatacccaatttataatctaaggtcctccgtttttcataattatgtttctcaaaggttgataggtattttatttttaaaatataactatatgtcaaagagtgtatgtcaaagaaggaaagatatcagatgtaagcagggaatgggtttttttttgtttgttttgttttgttttttgagacagagtcttgctctgtcgcccaggctggagtgcagtggcacaatctcggctcactgcaagctctgcctcctgggttcacgccgttctcctgcctcagcctcccaagtaactgggactacaggcgcccgccaccacatccagctaattttttgtatttttagtagagacggggtttcaccgtgttagccagaacggtctcgatctcctgaccttgtgatccacctgcctcggcctcccaaagtgctgggattacaggcgtgagccaccgtgcctggccaggaatgggttgttttaaatgatcctttattatgaccctttgtttagttttttgaaattatgtgtcctatgccttgaatgcattcaattttatcaaatgaaattggaaattcattctaaaccgactctgacaggaaatgcatgcatgcctaccacccaccaccacaagggattctagtacaagggggactgtacatttcagtgccgtttataaagatgggattattaatgtacacactggtggtaaacagaaatcttgagaacaagctgttaggcacaaaattcaaacactgaaaaaacaaaacaattaaaaccatcaaatgcatcacctctatgaaaagaaggaaaatacttaatgatgtagtttgtcccaaagaaatcaactattaagttttggtaccggaatattcttagatagctcagagaatcctgaaagaccatgtttattatgtattactattgtacttttaagtaacttaatcaaaaatcagagtacagagtaggtccatggtttctgcatccatgaattcaaccagacttgggctgaaaatatttttttttaaatgtgtctgcactgaacacgtacagactctttttttcttgtcattactccctaaacagtacaatttacatagcatttgcactgtattaggtatctcagaaaatcatcaacttcatcaaattcatcaacttagaaatgcatgtgctgcttccaccaactgtaaaatcaaattcaacaagaccagttcccataaattagaatctcaatccatgaagaaaacccctcctgagtgatggaagcaccagcagctttgtagcaggacttggggccatagccgagcacagaaagcaactcctccctcgacacccgggcatcaccagctggagcccagaggaacacaaagctccctcccgggcttgcacgtttgctcattccctatcttgccatctggaacaggcagaaagaaggaagtcatcacctgcgactagggatcctagaaccttcagtggtgagagctccagacgcctagagccaaggccccatactcattcaggtggactactccaacactccctcgtaccttccgcccctcacttcagtataggtggaattctcaaccaggacatgggtctaaaccaagaggctctgagcacagggtactgcctcagcagaagcagctaggctgacggccaataagaactctttaacctcctaaccatgtggacttgctgccacccacagggccaggactctacctctgctggcagcccttgctgcttgtagccaattgtgactccttttcttaaagccacagactcagatcacacactcctaactttcgggcagggcttcaaggtgagtagacagacggctacttcaacagtgcaaacgcaaggtggcggtcctcggctctcgaccaccctctaactctcgggtcccacatttgcagggcatccatgtgacgtgtccttttaaatgcttagttggggagctgtcaagtaactgagctgactctgggctgaagcacaagcttctgggccacacttcatcactgtccaattctacaccttggtattaagcaaaaacccaactaacagattccattaatgcaatctacgacgattatcttacaaatgtggtgattaccgtactagactaagtacctttccccgggaagagatggaagtgctgcctgccatgtgcctggccagtcagctctctggaaacacttactcgaaggggacgtgggtggtttcctggaaggccgccgctccactttggggccactgacaggctccgtgggtgcatccaggtgttcttctgagcccagcgagaactggaaccggagtgtacccgactccacctgcttcacctgcaatggaccagaagagcagtgatggccactcccttcatcagcacgcctatcagaacgatccaaccaggaacagcaggctctgccctaaaacaaagtctacgtgaaatcagaggcttcttgatgccacatgttctcagattataatcaagtagtttgagcaaaaagcaattggtgtggcattaaaagccctgcagaccatatgatcatggaatgacccttacccaagcagaaatcgcaatctctctcgagttgtgaatgttgtcattgacctatgtgaaactgacatctttattctgggtatggctctgtgggttttggcacatgcacagattcacataaccagcaccacacccagggtgcaggccagccccatccccccagggtgctcccttgccctgccctgcccctctgcagccacacccagcccatgcctaacccgggcaatctatgactgcttccccagcactgtcatttcgtctttttgagaatgtcaaaaaaatgtccaacacatggaatcacataatgtataacttttgagaccagcttctttcatttagcataagactgaggagattcatccaagttgttacatacacatcaaactgtttctttttttattactgagtgatattctattgtacggatgtaccagtttatttatccattcactcacaaacatttgggtagtttctggtttgggtgattataaacagacctgctacaaacacatatgtttgtgtgaatacaggtttcatttctccaagagtaggactgctgggtcatatggcatatttaatttcataaggcacttccaaactttatttctggactctctagtctgttccattaactgaattccttgatactaattatattaatcagtgtagctgtacagtaagtgtttaaactgtgtagtatgattcctccaactttactgttcttttttcaaaactattttgactcttctaattcctttagctttccatataaatttcagaatcagcttgtctatatcgccaaaaaaatcctgctgagattttgactgaaactgcataaaatctctagatcaatcttgggcagaactgacagctttactatgttgagtttcccaagacataaacatgttacgtctctccaattatttaggtcttctttgatttcacctaagaataaccacaatgacaactagcaaaaggacagttttattgttttcagcatacagatcccctaactattttgttagatttagttcatggagggcaggctttgtaaacaatactgtttctgtattttgctttcaatttttcagtgctagtatacagaaataggattgatttttcatgttgacttcctgtgttatcctgcaacctcactaaacccacttactcattctaaaaggacttttttgtagactcctcagaatctttggcatagacaatcacgttttctgcaaataaggacagttttgtttcttccttctaatgtgtaggtcttttgttttcttgacttacagcactgactacaacttccagtgcaatactgaacatgacgttgaatgctaacagtggacatcctttacttgttcctaatcttagggggaaagcaatcagtctttcaccattaagtatgatgttaactaaagagtttttgtaaacatcactgattatgctaaggaagttttcttttattgctagtttgctcagtttttaatcataaactgatgctgaatatcgtcaaatgttttttcagtatcaattgccaggatcatatggttttccttctttaggctgttactataatgaattacatttattgatttccaaatagaaaacagacttgcattctctggataaagctccacttggctatagtgtattattctttttgcgtattgctggactcaatctgctaatattttgttgagtattttgcacctatgtttatgaaggatacgggtccacagttctgttttcttgttattattaatattatttttctggttttgatatcagggtaatgctggcttcatttcatgagttgggaattgctcccatcttttctgttttctgaaatagattatataaaagtggcattatttcttcttcacatgtctaatagaattcatagtgaataggcctgaatatttctttttcaaaagtttttaaactatgaattcaacttacatattagttataggactactcaggtcatctacttcatcttggctgagttttggcaatgtggagtttcatattcattcatccatttcacctaaattgtcaaatttatgtgcagagaattgtttgtagtattcccttattatccttttaatacccgtgaggtctgtactgatattccttctttcattcctaatattagtcatttgtgtcctcccttctttttcagtcttgctagaagttcatcagttttactgatattttcaaacaggttcttgtttcactgggtttttgctattttttaatttttaatctattgtttttgttttcaatttcattggtttctgctgttattgacttctgaatagctttgggtttattttactcttctttttctagtttctgaagacaaagatcagatcactgaattaagatcttttttctgttctaatataagcacctaacgctaagcatatttgagctgcatcctacgaactttgacatgttgtatttccatatctgttaagttcacaatatcttctattttcccttgagatttactctttactttatggatttttacatattgtttaatttccaagtggttgaaaatttttattatctttgttattgatttctagttcaattccattataatctgagaatacatcctgtataatctcaactctcttaaaactgaagtttgttttatgaccaaggatattgtctatcttgatgaatgttccatgtgcacttgtaaacaacgtgtatcctgctgttgttggggagagtgctctataaatatcattccgatccagttggtcgatggcgatgttcagtccttctgtatcattgctgatggaatagctagttgttctttgtttacttagagaggatgctgaagtctccaactctaattgtggatttgtccatttctcctttcagttcaatcagtttttgcttcatgtattttgaagctctatgttagatgcaagcaattttaggattgttatgtcttggcaactgacccttttatcatgtgtactatctctcttaattcctggaaatttcctgtattctgaagtctagtttgtctgatagtgtcaatagtaatatacccactccagttttcttttagtgtttgaaaagaatattttccattcttttaatttacgttatatttatttaaagtatacttcttatagacagtatatagttgggctttgtctttcattaagcctgacaatatcttttaaactggtgtgtttacactatttacacgtaatgtaattataggcatacctcaaagatactacaggttcagttccaaaccactacaataaagcaagtcactgaattttttggtttcccagtgcatttaaaagttgtatttatactatactgtagtcaataggtgtgtaatagcatatgtctaaaaaaaaaaaaaaaaaagtactgtacctaccttaatttaaaaatactttattgctggccgggtgcagtgactcacatctgcaatcccagcactttgagaggcacacagatcacctaaggtcaggagttcaagaccagcctggccaacatgatgaaaccccatctctactaaaaatataaaaattagccaggcatggtggtgggcacctataatcccagctacttgggaggctgagccagaagaatcgcgtgaacctgggagatggaggttgcagtgagctgagactgcgccactgcactccagcctgggttacagagcaggacttcatctcaaaaaaaaaaaaaaaaaaaaaaaaactttcttgctaaaaaaatgctaaccattgtgccattataggtatggtgactcacgcctataatcccaacactctgggaggccaaggtaggaggatcccttgaacccaggagctcaagatgatcccaggaaacacagcaagacctcaactctacaaaaattaaaaaattacccaggcatggtggcacatgcctgtagtcctagctactcaggacactgaggtgtgaggattgctggagcataggagttcaaggctgcagtgaactatgatcgtgccacgcactccagccagggcaacagagtaagaccctgtctcaaaaaaaaaaaaatgctaaggatcatctaagccttccagaacattgtaatctttttgctagtggagggttgtgccttgatattgatggctgctgcctaatcagagtagtggttgctgaaggttgggatgcctgcagagctttcataaaacaagaccacaatgcaagtttgctccatcaattgacttttcatgtcataaaagagtaccatgcaatgctatttgacagtattttaccataggcagaactttcaaaatcatagtcaatcttctcaaaccttgccattgctttatcaactaagtttaggtaatattctaaatattacatctatatacctttaaaatctcaccaaacactgcagccgagcagaaactctgccacacctcggagagcccaacggactctagccatctgccagagcagggtttcgcactgtctgtggtgccctgggtcaccgctaaccatcctccaacaccgccaatggggccaaggaggctggggatgagaccctcatacacacttcaacccacttcgctctacttgtttttgccgtcttaattggggtgcagagaacatttcatttcagaattaaaaaaaaaaaaaaaacctgagaatctctgctgtggtcctaccccttggtacacacccaaggtccaacaagcattagtgataagtcacaaagataagccagggctagaaaccagaaccggctcccacctcagcactcatccaccaaaaaacctactggtaaaggccacatgaggcccaagctccaatgctccaaacgtgcacgccacacaggtgaatcttgctgcaaagtgtgtacacatcagctggaggttcaccaagtcatcccaggaaatcagtatgtgaacagcaataaaacccatgataaaactggtcttatcaggtttacataaaaacatcatactaatctttctaaaggcatacccatgacatgaaaaaaattctgtaaatgaaacatctgcaaacatatttgtgaacttttgcttttgaaaatgaatgaacttgctagaagctcaccggagatgcataagaaatacctaataatttacctcttcagagctcatgctggctgagggtaccttgtagaccagacagtgcgaggggttgggctggatcccaccctgcagaggcagggtcacccttccagaatcagcttccagcaaggggttccaaacagcccagcggaccatgtgcatgcatgccaggttggacagagaggtgaccgaagctgcctagaattaaaacaaagcacatcggtgtatgagttatcacagaagtcacctggagaggggaaatcaacagtgctttcatgtgtaaaattcaacgagagctcagtgtagcaaggggcagggatcatcagttgcattttataaaaggaactagggcaggaggaggacatggcatccacagtgcagacagtagggcacagatagtcttcagttacatgaccccaccgacccagtcaggacccctgcccacccatgagtctccttttctggcccaaggtagtgatggcttcccccttagagaccagcactgttttatgaacccctgttcccataaggatctttccataggtttgtaaacactctgcaccttgccaacaccaactcaaatccgtcaggaaaatactaggaacagcactttgaattcctaatcagaaatttggtaaaataacgaagaatgcacatgtatattcaactcagcattattagcacacattttctccacaaagctccagcttacaatagcacatttcgtatctgtagctttcaggaaattgggaaatcgatcgggtcaaattccaggcattgttccttctttctgcttctctctggctggccaaatggaaggaatgaggacactgtgaaaaccaatcccttgggttacaaccacattaaagtcattgtcacaaacacggtttcacggcttgactgagtaaagagttttaaaattaccaactttcatccatttacttaaaaagaagtaggactaaagctaaaccccggtcttttttggaccccaaagtccagcagagccaccttgttgaagaggactccagaggtgatcagctctgaaccaaggccctgcctgcagatcctgcaggctcccctggtgggtggagcacacttaagtcaccaggaagccgattagccagaggcccatggggtacaggcaacagcgggtccgaccaggagccccagttagagctctttccactcctaagatcacagctgcactgatcagtaagtgctgcggagcgctgcctagaccagagccaccggaacagcccagaggaaggaggagcagctgtccacttccacctgggacttccagcctctgtgtcccatgcgcaggagaaacaacccccaagcaggaggtggtgactggaccatgagcacagtgctccacttcctacagtgctccacttgctacggcttccccccagccctggctaacagagacagctgcacccttcaggggtgacaaaagtaaaatggggtggctccccactgctcccagtcccgggcttggctaaggcagccaagggcatccctcttaacactgctgcctgagggcatgaacccaggcagcatcgcaagcgcagccatggtcacagcgaggaggtggcccggaaggaggacgcgtcccactcttggtgacgaatggacgcccatgccctgcctaggatgggtggagcacagcatccaccaggaacagagacacccagaggatccaggaatttgcgctgccctgggagcgaaggaggaggcaagactccagtggtggtggccaggggtcctaagggactttgcttatttggctggacatgccagtggggaacagccacaccagtgtcactgcccagactgcactcaggtcccacacagatccccgcatgcatgcgtgctctcaaggcctctaaaatccggacacagatggccccatggtctctactgggctaaaccacagccaacttcatatacaagcagatgtgaatacagaaaagaaaacagttcttgtttcttccaagttagcctcttccagactgttcctgccagatgatatcccatcctgttatatcctaataaaaatttagaatcggcatcttgtttcacattaatctcttttcccatcacaatcggacttcaaaccatccacttctgcagagccctttgctgcagctaaattccagatcatgggccaggttactgccacattcacgcccccgtcacagggtgagcggggatttgggtggtccctggcaattcaatgagaaaacacccacaccatggaaggacatagaatcagaaaagtaagaaatggaagcatatgactctaagccacactttcaacatttgccaaatacaaaaacaatgtcttcctgttccccatccagttagctgacaacagattataaaacagtgctgagcaactatagcataccaacgacatggtgattataactccactgctttttaaaaatcaaattacagccaggcacggtggctcacgcctgtaatcccagcactttgggaggtcgaggcgggtggatcacctgaggtcaggagttcaagaccaccctggctgacatggtgaaaccccatctttagtaaaaatacaaaaatcagctgggcatggttgtaggcacctgtaatcccagctactcgggaggctgaggcaggagaatcgcttgaacctagaaggtggaggttgcagggagccaagatcacaccactgcactccagcctgggcgacagagtgagactccatctcaacaacaaaaaaatcaaattactataaatgtattaggaaaacttgtcactataaggattcaacaatgtctagactacttttgtaaacagttatcattataaaatacagaagtgtattattacaggatcaaaaacaaaataaagtaaaatatgtatctacgttttcatgctatctatacaacttctaattttccacttaggggattccaatatctaattttccaatttcacagttctttttggttctccatcagtagatgatctcctctgtgcaaagtatctgtcagttacataaacatgcatttttcctcacttttctgtttaacagctttaataacaacaacaaaaaatctgtgtagccaattattgatcattctttctgagacctcaacaggcgaatgggggcctggtgggaagccagtcgccatgtatttgcccacacttgctcactgccagcccacagagggaccggcagacaggaactgcccgaaaaccacctggctctgcagagaaggccaagcacaagcagagtcacagtgagtctaacacgctcctacagccagtggatcctagtgcttgagatgacatccactacttcatcattccttttcctgcccaacttgggtttgaattcacacaaactgaaaagaaaaaaaaagccccaaatacaccgaattgctcccatttagactttttaagtataacagcaccaaatacacaagtacaaatacacaaaagacaaaatacacaatacacaaaagacaaatgaggaatacacttggattatgagtcaggttttgttgtggaacagaagtgccacacttgcatttaccacgcaaagccgctcacagaaaacaggcccttggcctctggaaatgctacaaaccagagtccctgtggcgggctcaatgtgtcctccaaaaagatgctctcagcctaatccccggaacctgtggctgtggctttgttggaaacaagggtctctgtggatgtgattagttacagtgttgtgggatgagataatccttcattatctagactggccctaactccaatggcaagcatccctgtaggagcaggggagagagagacagacacagagggagacacagagaagaggccacatgacgagggggcggagaacggagtgatatggccacaggccaaggacagctaggagccccaaaacccacaagaggcagggaggccccatcccacagaacctccggaggaactcagtcctgccacacctggggtttcctcggaaggagctcggcccgccacacctgagctttgcctgaggaggatctcggctctgtcacaccaggggtttcctggggaggagctgggccccaccacacctggggtttcctggggagaaacttagccctaccacacctggggtttgccagcagagcagattgtggacctgtggcctcagagctgtgagagcacacatttccgctgctttgagctgtggagggtgtgacactttgttacagaagccactggaaagtcatacaggcccttgatggcttctgtcctcagatcaacctgaacttacttagacgaaggtgaaaacatcacattacttcacgagcttcattttgtttagattttcagtgagaccttttcactcttgcctaggcacccagcctctggccctgggcccagttctgctgggacctccagccccaggaactgggaatgcacagtgaaggggatggcggccgttctctgggtaatgacagggtggggtccccgccaagcagcgcactcacgctccactgtctcaaggccttatccagatagagagctgggcccaggggaactgccacctcgatggaggtgacatgtggcacttggctgaggacaaattttaaaaagacaaactactgcgtcaaaacatctctgaatgttcctagtatcacacaaatcacagaggacataaagaaaaaagagagagaaatgtaggtctataattatgcagacgaaggagacagggaggcctaagataagtgtgaggaaagcagctcaggccctgggctgggaacacgcgcagtcacactcacgtggtgtgagagccacagcagggacagggctgacccctcgcaggcaccatccaccctgtgcaccagctcccaccctgtgaaatgaccaccatacaggcgcaggaaacagagcaaccagccgcacacggcgggtggcacagacccaggagcatccttggaggtggagcctggtgtcccccagcagcatgacaggtggggcacacaagcggcgggtggctccggaactcagagctcagggcacgggctgagggcaagtccttcccgatggctcgctcgctggccggcattctccctgaaggacacggagctcttggcccttgaggcgaacttcacaaggccagagagactgagccccaccaggtgaagagctgggggtggcaggcagccaggctggcgttggtgcctctacctcctggctgagcagcaggaagaaccaggagcccagaggtcacaacagcagcacagccactgccagcaacagcggaggttcacaagccagatgccatcaaccagaagctactcagtcctcaaatcggatccagtacatgcagaactgagtccaaacgagacggacagcaaacccggcagtggctcccagacattcctgggggaaaggaatcctaaccacaggcagttaaagtcatctcctccaaccctctatgacacaggctgtgcgctgtcatttaaaagctgagtgaaatttaacccttttcccatttagaaaaacaaagcgcagctggctgccagcactcatttaattttacataaacgtgctctttgaggctgaagcaaatctgactgattttcaatgtgaaaataaaatgtaaaaactgttcttggaattatttctaaacagaacatcagaatcgtctgaatcatcagaatcggctattttggaaaaatcggattcatcaaacgaatcttcggccaacaactgttagagaacgatgttaacaccacgcataggaatgttacattttctagaatttgacattttcattgacggaaaattactgtatcttgtatatggaaataccactactaaaaacataatgctataaatagaatgatgtcttttgtttccaaagtcaatatactcgagcaatgcaaaaataataataaaagtgagatacttcatggcaaagctgccgcaggataaacattgcagccacaagtgcccccagtattctcggggcaaactggaaaagggctaacaggcaacattttcatgttattctactgagtgcagtaattatttttaaaaatatacatgaataatgaaaaaactgtggtatggttttaaagaaatttccataacctggtgaaactcttcacacagggtaataggttcataaagccttggtcctctgcaaaacaagcatcaacttgacaatgactaaaagaagcaacagcaaaactgtcacgcatttggagccatggcctgggttgggccggtgtaaagctctccgccctctggagcaagtctgggccccagcggctggcatgtgggcactgcagggcctgggttgggcaggtgtgcagctctccgtcatctgagcctagtctgaggcctggtggctggcacgtgggccctgcagggcctctacttctcaccccagctccacttccctccctgccctcactgggtctcacagagccaatgaacactggggtcagattcagggcccagcatccactgcagtgggcactgcccttccacaaggcctggctccaggaagcaacccccacctcagccacacagtagggcaacaggaaatcccattcccccatgccagtgactacaccagggaaggggctcacgtgaggctggccccaggcctgctgtgagaccgcgttgtctatgagcttggatttaaggaacttgggagcaagaagctttctttcattacgggccaccagcagggaaaaaagttagcccaacgcagttgacagtcacacccccaccaggaccccagggcacagaaggagggaagaggacaacagaggatgaggtggggccagcagagggacagagaagagctgcctgccctggaacaggcagaaagcatcccacgtgcaagaaaaagtaggccagctagacttaaaatcagaactaccgctcatcaaaagatagtgtaacatttggggtgctataattttaacatgtcccccaaaaggcatgtgttggaaatttaatccccaacaaaccagggctgggaggtggagcctcatgagaggtggtgaggccatgagggtggagtgaatggatgaatgccattgtctcgggaatgggcctcttctacaaggacgagttcagcccccctttctcttgctcaccctctctttgccctttcgctagggagtgacgtaacaagaaggccctcacaagatgctggcaccttgatcttggactccccatcctccagaaccatgcatgagccaataaattctattcactataaatgacccagtctgtggtattcagttacagcagcagaaaacagactcagacaggagcaaccagggaaaggggacacaaatctccccgctttactcttcataactgcaatatgaatctacaattacctcaaaatacaaagcttaattttaaagacagcatgcggtatataataagagctacataaaatgctagtaaaattgcttaaataataatgactgtctacaaaaacaaaataaaaacacagtgctaattcagacaatataatgaaagaaaacatcccatttacaacagcagcacaaaaaattaaatacccatgaaaaaatttaataagaattgttaaaaatctacattttaaaaccatttttaaaatcattcctgaaagacacaaaaatagacttgaacaaatggaaagacatcctgttcttggttagggcaactaaacatccttgagatgtaaaattctctctaaattcaatcataaatttactgcaatcccaatttttaaaatgccaatcagcattttttggagctagacctcttgatacaaaagttaatccagaaaataaacatgcaagaaaagctagaaaagcaaggaaaagaagaaccataaagctgaacttgccttaccaaatgctaaaacacacaacagagcctccaaaattaaaacagtatggccatggtacattaacagacagggcagcccatgagagtaaaagtccaaaaacagatgcactatccataaagacagagtatgtgataaagacagcacattaagtcaccatggcaaagggggacttctgagtaagtggtagtgggaccagatggccactgggaaaagataaaatcagatccatccctcacaccacaaacaagagatctagacaaaaaaaaaaaaaaaaaaaaaaaaagggcaggagaaacattgcacgaggagaaaatatgggtgaattcctctatgactggggaacgaagaaaggctttttccctgactcaaaatccagatacaataaaagaaagaacttatatatctgactacattaaaagatgttttaatgtttacacagccaggaaaaaaaataaaaagataaatgacaaaatgaggagaaaatatctgcactatttatcacagataaagagcaaatatccttaacatacaaagaacttttaatatttgatgaaaaatgcaaaaactacagaaaaatgggcaaaataagtagagatgaagatgagcctgaagcatcttctgaagccagaaagtactcaaacacaaaacaggacgaaggatgccataggacacaggggccagcctcaaggactccatccggccaaatctgggacaatttgtaccaaaataatcagaagcagtgactttgaaaacagggatccctgagtccagacccatgtgcgcttgatggacaagtcaaccatctacccaccagtgaggagacagggggccctggggacaggaggtgccatgccagctgcaggtctgtgggaaagctgggctggggctcctcctcctgcaggaagcataaacgacgccaacccaagggggacaatcggatgaggagcagatacccacgtggtctcagagtctccccacagatcacttattagctgcatggaggaaaaaaggtaactctacagtggagatatcagcaaagatcaccacaaccaacctcgcccaggatgaacacatgcacgtctggatgtgggacccaaggactgccccttgctcacacggaccactaccaggaaggcacaacctgactccaactatgaggaagcatcagatgaacccaagcaacatacgcattaaaaattttttaaagaagggagactaggccatgcacagtggctcatgcctgtaatcccagcactttggaaggccaaggcgggtggatcacaaggtcaggatatcgagaccatcctggctaacatggtaaaaccccatctctactaaaaatacaaaaaattagccgggcgtggtggcaggcacctgtagtcccagctactcaggaggctgaggcaggagaatcgcttgaactcaggaggcggaggttgcagtgagccgaggtcgcgccactgcactccagcctgggcaacagagcgagactccatctcaaaaaaaaaaaaaaaaaaaaaggagactaaaatattaaaaataaaatcataaatgacaaaaaaaaaaaaaaaaagctgaggaactgttccagaattaaggaggtcaaagagacacagaaaccagacacaagacatgatcctgaactggacacggtactggaggaaaggccatcagggacacacatggatcagttcaacagaccctggaacatgggccattgattttgttccaagaatatgagttaatacataaacaataaatcaggcaaatcttcaccccttagagatttggggagagggttattttgtcatgtgacccacagaaaaggactgtattcacccccagaggctcaggaggatgcccgcttattcagacatgaaacgcagccaagacaccggatctggtgatttttgcaggtttgcccctgttgcatttcatgctcatgttacagggagtttgctccatcactcattcagtcagcaaacatttctggagcccacacttgcatgcataagacatttcaaaagaggcagtgctgtggcagtcaaatgaggttgcactgtccccaggatcctgggaagaaagtggtctggacaggagggactacttctttggtagtttctttagcttcttcacagctaacccaaacataaattacaggaaaaaggttttagatgctttggttaactaaaaaatgcaaaaaaattaacagcagattaaagtcagtgagtgtgtcttggcaaaacttttgttcctagtttgtttccaatgactacaaaatactcaggacccaaagaatacatgcagactccagtgcctgggtgtgccctgaacacagtatttgttccatgttctcatcagcccaggtagcctcctcgtctgtgcataccatttacagatgaatccttccacaaagggcccctagacaccatagcttttgcctcctgatctgatgcatgaggccaagtgaagcagctgccaaaagcctggtgcattttggctctcccagcattacgaatgtgtgatgaaggcagcagggccacagggagagcagatcctccagtcaaaggcaacatgaggaagccactgccagggaacaacagacaggccgcccagctcatgcaggaagacggctgtcacaagtcactttccagggaaaagcacattgctggggtttgtccgtttcttattaagtaaaatacttaaaaaatgtacacccaggctgactggatgtttgatgatactaagaaatgcagtcaaggttaggtgtgatgatggtgttcacagtgacactccagagccctgtcttttggagagacatggtgagccatctgtagatgaaaggatgcaatgtctaggatgcggtctccaatagcccaggtggaacgggacgggagaaagagatgagacatgagcgataaattgggggttggaggtgggtgcagggagcgcaccacatgcttctccactgttagctttgaaatttcccaaaataaaaaagtttttaaaaaaaaaagaaatgttcatgccaaaaggtttacagatgaaataaaatgatgcctggaatttgtttcagaataattcaaaacgggttgtgggagaggacatagaagaagcagattgtccaggaagctggcagccggggaagctccgtggggcccatcgcaccagccagcctgttttcagctgtgcttacagcttccaccacgcagggtcctcaccaaagacaaggaggaggacgctgcagccggaaggcacaaccacacccagctgaaaaaatccccacccagctgaagaaggctgctctgggagacactgctgcagacggggtggctgaggtgggagggccctgccacagcccgccctgggccttccaaggagcgcgctgggctcctctaccacagccaccgtcacagacggccccgccattgtgcctttctcctctcacgtcccgctcaattccagtttcacccggtggatgcttaacccacttccaatggttccgcacaggaagcaatttttgtgtggaaggtcatttcacacactgcaacatttccattccagatttcacccaggaaagcgcacttgatgacagtaaagtggaatccagtattcccagttacaatcgaccagcacatcggaaagtaccaatgactggccgggcgcggtggttcacgtctggaacctgagcactttgggaggccaaggagggcagatcacttgaggtcagaagtctgagacctgcctggccaacgtgggaaaaccccgtctctattaaaaatacaaaaattagctgggcatggtggcccgtgcctatagtcccagctactcaggagactgaggcaggagagtcacttgaacccaggaggcggaggttgcagtgagccgagatcgcgccactgaggggcgacagagtgagactctgtctcgaaaagagaagagaagagaaatcagtgactccatagcctcacccgcacccgcaccccagacgcccatgaagcggccaccatcgaaaccacctgttgtcaggaatttcagatgagggttaaaaaagaataaagtatcgctaagacatcttggtttcagcatacagatgtcataatcacaagtaaattacaattaatattctctagaagacactgagagtgaggcgccagccctcctgctcctccccacctccccccacagcccctgggaaccacacatcagccatcaggcgctgccaggacaccctgaggccatttctcctccgctcactccccagcctgggcagccccatccctccccatgagccacacccaccccagaagacccctcccacccaagggtattcacaaacagctgtattttagctgaaatttctggtcataagtaaagaaaagcagaactggaacagtttcattaaatgactgtgactgtgtcagtccacagaacgcttggcacttctggatttctgcacctaattaggactcggaatcatagggaccggaggcatggacactggcaaggtcaactcgccgctaccagaagagattagaaacaccaaatggcagctacaccccgacaccctgctctccggcctgaggcacaccctaagaccgtcctcagcacctcatgctccttcacaggctgttcctgagagagcggcccagtcgcgatggcaggccagatcgccatggaagatgtcttgtcaaccgttttttggtttctgatttacttgttaaaatgatacagaagtaccccgatctgcagtttcagtgaccctcagtcaaccttggtctgaaaatattaaacagaaaactccagaagaaaacaatccctaagtcctaaattgcgtgccactctgagcagtgtgattagatctggcattgtccccccccagggcgtgaatcatccctccgtcccgcatatccacactgtagacaccacccacccattgcagttgagaggtagagagagagagactacgttcacttttattactgtatattataattgttctattttattgttattgttgttaaatatcttaccgtacctaatttataaactgtgtcataggtatgtatatgcaggacaaaacctagtatgtaccgtgtaggggtcagtactacagaggtttcaggcccccactggggtcttggaacaaacgccccatggaaaaggcggaactgcattattgactttttcaaacagaaaactaaatcttaagaacagcaggatttgggtttctcaaagaatctacattaatataaatgatgtccacatattttatttctttcaactgaacctataaattcttactcttagtgttctataggtatatataaagttccctatgagaaaccatctctcatttgtgcaaactcaagctttaccacactactgtcatataaaaatacattaaaatggcctcatttttcaaaataattagcgattcaataatcatgaattaacgctattatgatacatgaaacttactgacctatgcattactcccagccagcagaatgcacctgtgatttgtgaaatatgtatttgatcttcgtccagtttcctggtatacaactcctgaaacccccggaatctccgaagtgctatcttttgtgtgctaatgagatgactgtggctggtagcccctaggtggcttcaggatggggctgctcacagaaagaccaaggcagggggaggagagtgactgaaggttacattgatcatcaatggccaatgtttaatcaattatgcctacgtaataaagttttcatcaaaacccaaaaggactgacttcagagagctctggacagctgaacccatggaagtgcccagagggcggtgcccaggagggcatgggagctccaagtccttcccacattctttgccctctccatctcatctgtatcctttgtaacattccttacaatcagctgataaatgtcagtaaagtgatttttacttattatttataataatcatgcctgtttttaatggaaaaagcattcatgcccactacatttatcctcacacacagagttcaccaccagaggaaaccgagtgcaaaagggctgttcttacattgccgtccactcctgcagggctgctgaacacgtactccagctggaagatgaccgcaaatgcagggtggccgaccatctctgggaggcggaggcggcttctcaaaaccagagcttggctcccggagctgggtcagaaacacaaaccagggacacattagagctcgagctcccatccttcccgcatccacgtcgaccactgtcagaacagtcaaggggacaccctgggggacacaggggtgctgctgcaacagcaagtccaccatgtaacactgcacgctctcccaaatgattcagaaattccccaaaacgctgctttttaagagatgggggtctcactaggctgccatgactggtctcaaactcctgagctcaagcaatcctcccgcctcagcctctcattgctctttcaacgcatttccaaattaccaaagcttgcctgcaggcctgatacggccaagttaccaggaaatgccacagaggatggaggctccttcctcaaggctggcctacggcagaggacacctggcctctgcctggcaccatgagagaggaaaggcatgacgccctgcagtgatgtctgtgacacctgatttgggaagcactggattaaacagagcagcaggtcttgctgccccctgactctccgtcctatgagaaactaatcacagggcacgcctagaaggcagcatgcaaggcctccgtagaccctcagcagccgcagctggaagcatccataatgctaacccccaaattgtcagagcacaaaaggaaaaaaaaaggggggggctttttccaaacttccaactccaaagtttgttcctaatgggcacaacttccaagaggaaagaaacacaaggaagaactcccacgtgggtgagtcaacacctgacatgcacaaatgacctcatttcatcgtgatcccttgcacatccccacccatccctggggacccaagagacaatacctggtcttggaagaggagaccactttcctgctgaagctagctgagcgcgtcaaggccacatccatctcaggcaccagtacaacgacctgcggcctctgcacgaagcccagaccattgtgcacgcccacacgcaggcgccgctccaggatctccagggcaccaccgtccagtgggccacatccctggaagaggcacagaaggaatgagccccggcacagacggaaagagggagctcgccagaagtccctgggggaggcgagcagagagaagaaactggagcagaagttgcagataactgcagatcagatgatgcttagtcaagatgagtgcaagcaaatgacagatacagcacccaatcccagccactggccttggggcactgcccgggcagttttggcatttccaacacagcatgatcctctcagcaacgcacaccctcagatgcctcgatccccaaaacccgacactagctttccaaggctgggctgaccattctcaagatgcagcaaactcgtacttggctccttcaagactcctccaaggtcccacagcccactcccccagagcccccctttcccagaggctgcttccccagagcccccttccctggggcccaattccctggacgacgatggagaggtgctcagaggcagagctcatcacatttcaactctgtctacccagagacctgagactgggtgtacaaagggaaacatgtttaggcactaagtcataaaccaataaaaacagaaccagccccaaagtggtcactcgatattaaagtgtttcatcttaacaaaaatgtacaggcgctataacaaatgaacaaggatattcccctggctattagtgtttattaaattatgtgatctttgcaaaatgatcctcaaattttcaagttttctttactgtccattaatcaagctgaacagacctaaattcagcctattagtctttggataacgaaaataaaactatgcagataactgagtatctgccagttggattggaacaaaaatacaaagatagtaaaaatacacaataaagtgatttttatgggactgtataaaattcaacaatgatattcctaaaacaactctaccctcacacaatccgccctgacaaacaagaaaacagcaggaactacaccaaggaaacggatgttggtgtttcaatcctattctctgctttgtgtttacataagaccatattatgtagaactgcattttcaagaacgggtagggagcaaacaagtccagctcattcacatacatacacacacacacacacacacacacacaacttgctaacttcatagactactaggatgagcacctgaatcattcattctcacaactaaatagtacagccctcctatgtgccaaacaccgttcatgcacatcacgtgtcattgtaaacaaaacaaagtccctgtcctggtgacactcaccacaggagaccgacaataacagataagaaggccagctgctcccaggaagggctgagcacccgggaggaacgcggggtgacagctggagacacggtggcaagggcggggaacagcacccccgcaggacagtcagaggaccccgtccagacctgaagcctgaggggaaacaagcagagatgtgcaggaagaacattcaggaaagtcagctacatgctccaggacccatgcagggacaagcatgagtccgaggccacctaggcagaggcatgcctgaatccgggaccacaaaacaggcccaggaagcagcacacagtgaagtagggaaaccagcaaagaccaaaccatgaccaggaggcagcacatagtgaggcaggggaaaccggcaaagaccaaaccacgtgcatcttggaggaccaggagcctaggtgtcagtccaagggcaatgagaagccagcagcaggttttaaacacagaagaaaaatggctgaatttatgtggcctctcctgtggcagccagtctgggcttgctctcatggaggcagatgtttaagagaggagtttaagagagggtccctaaaagtccaattacacttcatcttacccaaaaggccgagaagcaatgaatttatgtttttaaaagacctctttgactactgagtgaaaaaaatgttctctgggactttcaagtgaacatgagggacacttcctcagagaatttccttcccccaatacctaaggagcaaaatatgccaccaatcaaggatggcagcataacagaccgcaccagccttcaggacctggcaccaaggcaggacccaagccttgaagctcaaagggaggagggcaggcaccatgcccaactccgcctccacccccaggagctatggccgagttggcaaaatcctgggaattccaccaaaccctcatggtaaaggattcatctgcagctccaggtaagggatctttaaagccataccctttgtcctgtaacctggagtcccctacctctctgactctggacttggccagtgacctgctttggccagtgggagagtaacaaatttaatccaaaaagaggtttgaaaatgtctgcacatttccaactcctctcttaaacatctgcctccacgagagcaagcccagactggctgccacaggagaggccacaggagccacgccaccccaaccaaagtcatcctagaccagcagcccccagcggaccagccaactcattgcaggcccatgaagattttccaaaaaagtcccttttacttcctgctcgagattctactaaaagtcaggatacacatggaagaatgctcagccccaacctgaaaatagcccaaaagtccatcaacagtagaatggatttataaatcctggtgccctcacacggacgaccatccagcaaaaaaagtgagcaaatggagccacagccactgcagacagcctcccacgggagcatggtcttgagcaaaagcagcaaaacaaaacagaagaaaaaagtacgacttcatttaaagataggtcaaaagcaggcaagcctatactgtttagagatgcatcgataggcggtagaaccagaacagaaagccaagatgtgattagcacaaaggcccgagggaatgggcggggaggaaggtgcagccggaggagacccgcgaggctctgagggtgcctctgtgggtgccgggcccaaggcctccctctgccgtccttcctcgtgtcgcgcagtcacacaattgcattctgtgcgcttctgcgggactcatcacgaaaagggtgtgacgtgaagaggactcgacgcaacagcaagatgttacccacaccagtctcttggctctctgcaattaaagtttctttctctttgtttctgaagttgaaagtgaagactctctcattctaggagggggaacaaggagtggtttgcccacaacccaggtctgagggcccctccttccagagttgagagcagccagggctgacccctcttctccctactccatctggtgatcatcagcaaaggcgcaggcaagggggctgagcccagggctccagcagaaccaggcaatctccgtcccacatgcctgttccccctgctgctggcgacagaagagccagggcggacagacctcattccaacactatttgtgacagttcatcaggcccaatttttctagaccaaggacagattatcgcctagaaaacataagcagtccccaaacctgcaaaggcttttccaagtcttgtctggcatacaaacaagcttctacacagaaaatccaagacaacttttgctgtcagaggtgacaggagctctagaaacaacctccctggccctggtgttttacagctcgcaagccagagcatcgctgggacggagccggagaggaaaccccagcgcatgctgcgtactaggcaggctgagctccacgcacctgcacgacgcagacatccctcccaggggccacaggcaaacaggctcaaaagcctctgcctaacagatggacaagccctccagacgccctgcctgggcacctggacaaacccatacactgaaaagcaacagacaggaacagcagggagtgtgaacaggctctcagtgaccagaacacaatgacctgtgacacgggcaggccgaggggacagtgagtctgggggcgccttcccaggggcccaaggtgggtgagatgaccgaggcttccagccacctccggaaacgagccccatgtccccgccgacgtcctctgaacatgggaagggttctatgggtttccctatgctcatctggtgatttagtttactttaaatgaggactatttcatgatctaccagaattaactttagttaacatctcaggccaacagcaccttcatcactgttgaagttaaaacaactggaggctctgtgggggccttggctgtggaggaaaggggtccctaaagatccaattcacctccagaaagaggggaaaagacagaactacatccttagggccacagggccctcctcagcagcatcagatgcggggtctcccctgccccacccacccctaccctgccccacccacccctaccctgccccacccacccctaccctgccccacctcctccctgccctacccgggtcccacccctgcctggccccaccctgccccccatcacgcttctgactccacacctcctggaagtggtcctggacgtggagctccagcagctcttcctcaaacttctccagggaggggtacagggtgaagaataagtcatccaagtgccccgtgatgggcttctggaggcgaggctttcggagagcgtcgcctgaaacagtgagggtgcgaaaagggtcatccttgggaataaaacacccactggcagccaccgagggtccctacccaccccagcctcagccggggcctgcagcaacgaagggtgctcgggactcccagacagagcacaaggcccaagccaagcctccacaacaattaagcaaatacagatttcattggcagtccaaaatctaccccaaacctcctccaggaacagtttttctgttgttttgtttttcatttttttgtttttctgcttgtttgtttgtttgtttgctttgagacggagtctcgttctgtcgcccaggctggagtgcagtggtgtgatctcagctcactgcaacctccgcctccaggttcaagccattcttctgcctcagcctcccaagtagctgcgattacaggtgactaccatgacgcccagctaatttttgtatttttagtagaggcggggtttcaccatattggccgggctggtctcgaactcctaaccttgtgatccgcctacctcggcctcccaaagtgctgagattacaggcgtgagccaccacacctggcccaggaacagtttttataattcgacaactcaaagaacacagattggagaaggcaaagtgacacgtgcggccctgcagcctgctgcccggcatggcttccttcctctctccagcaggaacacggccagccacgccgctccttactttactgtgttaccttgaaccatctgcaaacacactgagcaggcatgagcctgtcaaggcaaccagcaaaatacagcctgaacggcaccacgagaaaagggtcccatccagaggacagtggccccagggacccagctcacggtctcgtgcaaagcaggcccatgaaaaaccttggctgagagagggaaggaccctgggctgcctggggagccttctccacttgctctagagcaaaggctcatccaggaggaggaaggatgagccaaccgtttcccaacctacacacacctgtggactctgccccttctttctccaccatcgtcatcttcttctggtcctagctccatctcttcctatattttaatgatcttttacttatgtagatatgtagatttttaaaagctaatttcaaagttgaaaaaaaagaaaacactgaggtaacactccatgctgatgaaactgccgtcaaaagagcactctactatcctgctgaagattatgagtcagtatcgcctttgcctttgagtatgtcaaaagctttaaaatatcactttctgccccagtaattccactttttgaacctattcagtgaaaataatcaaagacagaagcaaagatttatgtgcaagaatattcattgaaactttattataatagagaaaaatcgaagcaaccaaatgttcaataggggaatgttcactaaactattattcatcctgctgaataagaacaaaaaaaatcatactgtcaaagatttaataaattgagaaataatcgtaatattgtaagtgaaaagaatagtaacatatgaaactattacgattccatctgatagcgatggtatttaaaagcatgtgcacttacatgtatacatgtggatctgcaggcaggaactgtagattattttcttctttatagttttctatattgtccccatcacaaactcacattaggtttgcccaatggaacagaatagagattccagaaataaattcatgccacctacagctgactgatttttaaagaggtgccaagaacacgcactggggaaaaggcagtctcttcaataaatggtgctggacaaactggacacccacatgcagaagaatgagatgagacgccctacctctctccatatataaaagtcaactcaaaatagattgaagacttaaatgtaaaacctgaaactatgaaactactagaagaaaacggaagaagtgcttcgtaacactgggctgagtaaggatttttttaagtaacattgggctgtgaaaggatttttttaaataaaaccgtaaaagcacaggcaacaaaagcaaaaagaaacaaatggattatatcaaaataaaaaggtcttacacaataaagtaaacaattaaccgagtgaagagataacctgcacaatgggagaaaatatttgtaaactatatatctaacaaggggttaatatccagaatacataaggaatttaagcaactcaacagaaaaaaaaaaaaactagtagcttgattttaaaatgggcaaaaggccttaacagacatttctcaaaagaagacgttcgaatacctgtaggcacaggaaacgatgctcagcctcactagtcatcagggaagtgaaaattaaaaccacaatgagataccacctcacttcagtgagaatggccaccatcaaaaagataaaagaaaataagcattggtgaggacgtggagaaaagggaacacctatacaatacgggtgggactgcaaattacaacagccactatggaaaactagacagaggttcctcaaaaagttgaaaatagaattcccatataattcagcaatcctactactgagtatataatatccaaaggaaatgaaatcagtatgtcaaagagatatcgccactcccatgtttattgcagcactattcacaacagtggagacacagaatcaacctaggtgttcatcaatggatgaatgcataaagaaaagtagtgtatctacacaatggagtacttacgcaaccacgatcaaagaatgaagtcctgtcgcttgcgacaacacaacatgaatggacctagcagacatcaaggttaagtggaataagccaagcacagaaagacaaataccacatgatcttactcatatgtgggatctcaaaaagaagagttggtaccatagaagcggagcacagaacagtggttatcagagactgaggaggggagggagaggttgtcaaggggtcatggtacaagttacagtctaaattctgctgttcctgcacagcagggtaatgacggttaccagtaagttcccgtaaaatacaaaagagctagaagagcagctagaagagcggcttctgaatgtcctgaccacacagaaatgatgagtgtgggagattacagtcacgctagtactctcatttgatctactctacaacacatacgtgtactgaaacatcacactgttccccataaatatatacaattacagtaagccaagaaacattttaacagaatgtttcaaaaagctggggggggggggtgcagggagggatgacataaactaaaataacggaggacaaaggccatttcccagaccgacttcctttaggaaagatcacttgtgtgccatgggtgccccatctcaagaggcagcaactcagtggagggatcagggtcaccaggcatctgggagggggcagaagtcagtgctcctggaagtggcccaggctgggaaggaaagaggttctgtgtggccacctcatgaccagggtgcacacgcacccccaggagcaaaagccattccaatagttgtgaccctggtctgcacagagagctgaagatgcaagtcccacgcacaggaagtcatcaagggaggaaagatgggttcccaccaggacagccagactgaggagctacatctgcagtgagtagaaacttccagatcctggagggcccagggaagccagagaagcctgggtatcctcattcagccggcttggcaggccacatcttgcaagcatcatgggctctggagtaaagcacctgagcccaagcctggctcagccaccaagttactctgtgaccttcgagaggccaggcctggacaaaaacacagctgggcccggtgctgagtgttgccttcgcacatctgaagggctagctagcaaagggcaaacagatcagacctcccaggacgctctactgtaggaggcttggatctgggctgaatttaagacacaactttcatgatgaagacgctagtgctttaccaatccatctcattttctccccaaatacatctttatgagcaggccctattattgtccccaatttataaaggaaaaacaaaagcaaagacttggagaggctgggaaacctgcccccagctcacatcgtggctagacgtggagcagacaaccgccacaggtctgtcagcctccagcataacccaacaagcatccttttactacctgaaatcattcactctttcactcactcattcaactaaccaaccaacagcagcaaccacggcagacatgaaccccaccgtggcagaagtgacccccactgcagcagaggcgttctgcccttcatgctctgtagcttggcctacctttaatttatctgttgccaagtctctggctaggaaaggaattcccaataacagcattgctcctatggaaaaacacaccccactctacaacaatccattttattctgggacccccataagcacactacagagaaaacagggattgccagcaaacccttcacaagcaagaacccccttcccactgacatacagtggagagcccctgagattcccctaggccctaacgggctcccacagcccacagcctcttggggacacagctcttctgctagggatatttaattcagcagaatgcacctcagaaacaagaccactgcaacagtgggatatttaattcagcaaaatgcacctcaaaaacaagaccgctgcaacagtgggatatttaattcagcagaatgcacctcaaaaacaagaccgctgcaacagtgggatatttaattcagcagaatgcacctcaaaaacaagaccgctgcaacagtgggatatttaattcagcagaatgcacctcaaaaacaagactgctgcaacagtgggatatttaattcagcagaatgcacctcaaaaacaagaccgctgcaacagtgggatatttaattcaccagaatgcacctcaaaaacaagaacgctgcaacagcgacagcagaatgaaaactacatttaggaatgatttaagcaggaatgaaaatgactttgagctagtccaggtttattctaaaacacctattgcctttggtgactgtggttagatttgaggtctgcccttaccaaaatccattcaagagagacctatgacctccctcctaagagtgcaatgtgacatcctcagcacccagcccagggcctgcttcacagtgtctactcaataaatatttgttgaataaatcagtgaataaatgaatgaattagtgaatacgtaaaaagtatacaccaaactatgatcagtggttttctccacggagttagactagaagggaagactttcagttttcactaaatgtactgaacacacatgaacttcgtggttttaaaacgctctttagcatattgtataaaaggggcaaacaactgacaagctgcattggcactggccaggaacagccgtcagaaagcagcctcaaggccaggcacagtggcgcatgtctgtaatcccagcactttgggaggccaaggcaggtgcattccttgatgctggagctcaggagtttgagaccagcctgggcaacacggagaaaccctgtctctacaaaacatacaaaaattagctggaggccaggcgccatggctcacacctgtaatcccagcattttgggaggccgaggtaggtggatcacctgaggtcaggagttcgagacctgcctggccaacgtggtgaaaccccgtctcaactgaaaatacaaaaattagctgggcatggtcgtgaacacttgtaatcccagctactcgggaggctgagggaggaggatcacttgaacccggaaggcggaggttgtagtgagccgagattgtgccacttcactcttgcctgggcgacagagcaagactgtctcaaaaaaaaaaaaaaaaattagccaggcatggtggcacatgcctatagtccttactactcaggaggctgaggtgggagattgacttgagcatgggaggcagagtttgcagtgagccaagattgtgccactacactccagcctgaagaagagccagaccctgtctcaaaaaaaaaaaaaaaaagaattagagaagaatctggctgtcattacatacataatttaaaaagtttaaaaagtaaaataaaaagaaagtaacctcagggcccacacggcactggcaccccaaacacaacagaaaggctgggcaaattgtgtttctctcccaaaacaactctgagagtgggggcggggggcgggggggcggcaggtgttgctgagatacctatcctttctctccgaaaggcgcatacgacccttacctggtggagtcagtcagtccccctccctccctccggacaccatggcgtgtgctcaccctgccctcagatcccctgctcactcgattttcaacaccagcagcataaaacgtcattaattttgcaatgttctaggcactgccagcattcgtttggcaccttggtgacgggccggctgctccacacctggaaggccgacttgaggccaacgggccagacctcttccgaagcatggcttttaagaatgaggagcaggaatcatgcaccccaggctcaagctctttaatccaaaactctgtctcccatcttgtggtccccttggccccagcttgacacaagacactaggaacaaaaccaggcctgtcctcttggggcaccacggcttctcatttgcagtcctagtcatgaggctgagccagtccagtgacctgcaggtaattctgttggtctgcagttctactgacacccacgggcaagtcacaaagtgatgactacccctccggctccaagactcccaggtagtaagactgacacagctgacttgaaagcagcacacagctagtcccaagatcagtatccaccaggcgacatctcacagctagtcccaagatcagtatccaccaggtgacatctcacagctagtcccaagatcagtatccaccaggtgacatctcacagctagtcctgaagatcagtatctaacaggcaacatctcacagctagtcccaagattagtatcaaccgggtgacatctgaaagctagttctgaagatcagtatcaactaggcagcagcacacagctagttccaagatcaatatcaaccaggcggcaactcacagttagtcctgatgatcagtatcaagcaggcgacatctcacagcggcgcctacagggccctccctggccagcagaacaggggccagaaggacaagccacggaccaggtctcagagccagacacaggttttcatgttctctttgctcaactcaacagcagtgacaatgaggccttccctctgtctccttcttcctttcagaggattgcaggcagattacagggtaagacaccccgaagtgggcgtggagagcacttatagctcagtgagcaggacagacccagactgcgaccccacgcttgctcttgttcagagttcattcctcccttctcatttctcaccctctcctccctggaatgctggaaaaacagtgacttcacaatgatgatgtccaccatagacctatccaagaaattaattaactcagataataacatctacaccccagcaccaaccagaatgcctgtacgatgcacagggctgtcattgccaacaaccagggacctgcgccggagccgagctgcatccttttcttcagggtccagaatgagccaaactctcagcacagcactgctctcggtccccgcccctcacacacaaggtcaaatcctgctcttcctggaacccagcagggagtcagtcacccaagacacccgaggttctggtggtgccaggacatctccatcacatgacaggtagaaggaggctggtgtgtcccttctcctggagtcctcaagaaagccacacaaaagtctccagaagtgcctggaagaagcatgcagcccaggccatgaggaccacccagaagattcctacagcagagcacacccccaacactcccatggctgctggggtcgacccaattccaccaccagagaatcaacttctgaaaaccacaccaagacagagcccttgtcctttaacacgaatttcagtttccaaaaatcctcaggtcactgcacacccatgttcacagcagccagaaggcggaaggctcaagtgttaactgatgaaacaatcagcagaacatggtccatccatagactggaatatcatccagccttaagatgaaaaggaaggaaactgggacacacactataacatggatgaacctcgaaaacactccactcagaactttgaagacatttcactcttaggatgaactaacagagcaattcccctctcttcctaaagaatgccggccactgaaggacaaggactgcatgatcccagtcctatgaggtccctagagtcactgaaaccatgaagacagaaagcggaagggtggctgccaggggctgggggagtagggaatagggagtcagtgtggaaggggacggagcttcagccggggaagaggaaagagctcagggatggatggtgctgctggctgcactacaatgtgaatgtacttattgccactgaactgtacattttaaaagggctaagacggtcaattttatgttatccttattttaccttaatttaaaaatcatcatcatgatcatcaggtcactgatatgatgccacatggctgagatccagccagtggtcttcctagctatggtcacagagacttgaactctgtctctcacgaaagcattttcccaaccaaagcagccagaaatgactcgaaggatgtgagacactatttaggagggaaacggaaactagactgccattccatcctcctccactgtcccccacaacccccgccaggccgtgctgctgagctgcagaggggcgctcggcccacgctgcccccagaagagcccagtgccttcaaggtttcactgtgaactaggacagactcacctcaccaagtggagagaatcaaagacgcccttaccggattctccatgagctggaagcaggccaggtatctgctgcagaccagacaccagaaggttctcaggaagaaggtggaacgcaggctccagggccgggtgtggcttcagcgtgtactgcaggctgcagttctcaatgagggtcatgtgtctgttttctggtgaagaaaacacaatgtgatcaactgatagctgaaagcaaaggtgcttccagtcaaaccagccaattaacagagaatgttagaaacaccacaaacaggaaaaggacttttctagggagagtgaagtggtgctctgttccgcctcaagtgaaaggcattgatctttaataaccttctctggtaaagttacaatttaaaaaatgttttaatttttcttttttgtttgtttgtttgtttgtttttagagacagggtgccactctgtttgcccaggctggagagcagtggtgtaatcatagcttcctgaagcctcaaactccagggctcaagtgatcctcccaccttggcctcccaaagtgctgggattacaggcatgagacaccatgcccggcctggaggtgcagtttttaatccaacataaaatctctcccacccactaattccctcagtctcctgagagcacagacaggcacagactgtgcagtttccccaggtctcgctggtccctgccatcagaggggcctggaggacaccctggcccgaggcctgcctgcctgcctttgtgtgtcagcacttgtatccaccaagccccaaacggaggagggcagcactggagggaggccagcagcatcagagacagagccctgtcctcagggaggagccactttcctggagtgatggctaagaccaaacacgtggatacccataacgcacgggagaactggatccgaaccacgggacagatgtgggtaaagcacgagggggaacgtgaggaggaaaaagggcatgaaggaaagactctggagaaatgacacccgggaggagtgcggctacaccgcagggcgggcaggccctgaaggtagaaggaacagcattcccagaaacgggagtgcggggagaggcacacccccgaaacacagggcctgggctgccctcttcacattcccaccaaacggccaatcttgctcgggcctgattttctccagtgacaggaagtccaccacatcccgaggcacagggcatgcacgtggtctcaggcggctcaagtcccagctgtggccgggccagggacagctgctgagagtcacaagttcagctcattcatgttctgatttcataaagaaagagctaaatatgaactactgtattatcagaaaaagaaatttgtgaaaaactaggtccgccatgggggctcacgcccataattccagcacaggtggatcacctgaggccaggagtttgagaccagcctgatcaacatggtgagaccccatctctactaaaaatacaaaaattacccaggcgtggtggtgcatgcctgtaatcccagtgacttgggacgctgaggcaggagaatcgcttgaacccgggaggcagaggttgcagtgagccgagattgcaccactgcaatccagcctgggtgacggagattccatctcaaaataaaaaaaaaaagaaattggtgaaacactgtattttttttagtacctaaccacttcaaacatggaatctgcttactttaaaatttaaaatactgctaaaggtatttgacctgagtggctagtcaggagtcacaacctctctgggggcggggcacacaggagaaataggaaaagactccaaatgctcagacctcagacccagccaccagcttcaggattttgccctaagaattcacgcacatgctcaggggaagggcggacgcccactgcaacggggtttccaaccttttcttttcttttttttttttttttttgagacagaatcttgctgtcacccaggctgcagtgcagtggcatgatctcggctcactgcaacctccgcctcccgagttcaagcaattctcctgcctcagcctccccagttgctaggattacaggcacctgccctcacacctggctaatttttgtgtttttagtagagacagggtttcaccatgttgaccaggctggtctcgaactcctgatctcaggtgatctgcctgccttggcctcccaaagtgctgggattacaggcgtgaaccaccgctcctggcccaacctcttcttacagaaacccctaagggtcggtatgcaggtctattcaatcaatcatgaaacatcaattccacgaaacaccacagagctgtaaaaagagtgagtgctttctgtgtactgataggaaacattcttctagacaaattgtaagggaagaaagcaaggtgtggaacagtgagtaagaagaggtcaagaatcagatgcaatactggacaagcgcattagcttctgtgtccgtaaaacgaccccggaagggtctgttaccagggcagccctgatgaaataacagcaaaagttcctttttctcactgttttccttcagtccctttatctatgggtacagctgctttaaaggaaccagatggcagggatgccaccagagcttcttgacccctgaccaaataccagagagagatggagccccacgaaactgctgcaaactagaacaggtgagccccagttgcctttagaccattagcatatcattataatgctaaagaccattctccaagagaagaccaccgcgtgttctgtacaagccatgcctggagaagcatgttatgatctgcgtcaatgtgcctggagtcccaccctcccggcctgtacccagtccttcatctccatgcctcccactgtccagggagaaggtgcctttaaagtgagggctcccttctccactccctggccagtgagtaaaacctgactaccttttccaattggatattctttctttgcagccgacacaaagtgggaaaagaactcggttctccagtgacagatccacaagaacccaaagagagaggttacctggtagcaggtgaggggatggggaaaggagacctcactctcaactttttatatgtatatattttatatatatataacacacatataaatatactatatataaaatatataatacatatatattatatatatatatatatatatatattttttttttttgaggcagggtctcaccgtcgcccaggctggagtgcagtggtgcaatcatggctcactgcagcctaaaactcctgggctcagcaatcctcccacctcagcctcccaagtagctatgaccacaggggcgcaccgccatacccagttaatgtttgtattttttgtagagatggggtctcactatgttgcccacgatggtctcaaactcctggccttaagcaatctgcccacctcagcctctcaaagtgttgggattacaggtgtgagccactgcacccggcacttttttatacttttggattctgaatcatgtgagtgtattgccattaccagcaaattttgggaaaagcccactgcaaggatgagtgaagggccccgcagcaggttcctcctcacagcctccactcagggccaacagcttccacacagacgcatggacatgtggactgtggacgtggagcgaatgtggtggctgtctactttgttctcaggatacttctggacagaaaatcccagcatatgactaattagattcagttgaaaaataacctaaaagccaatcttcagcaacgaaatgaagttcctgactggttgttctcagtaaactaaaaataaaatcctgagcccccagtggactgaagggacctcctcttggcctagaggactccagagcagccttgaaaactgagttccaggagtgacaggaggggaccagacaggcctccacatgccccggcccatgctaaccaccgttagcctttcttccctcaggactggaaccagcccttctagagactccatcgctgctgctgcccagcgatcacccaccgctctccctcttctggatagtctacggagggcatgcagggagggctttcgtgtcccctgcttcaccttttgacatcagaggccgagaacttcccctcgggtcctgccagtgccaccacgttttgaacactgtgtcccatgaagcggcatgggactcagctgcgcacgtgcacgcttctctcataaacacgcaggactcctcctgggcttattaaaataagcaggctcagcccccactcagcagaaattcctcttccctctgcccctctctcgaagggtctgtttctggcttctggctggaggctacacttcccagcctgtcagaaaggccacctgcaggctgcagccctttatgagaaatgaatctctcctttccagtctcaggaacctcatcactcttcagctgacatctcctatcacgagattgtcaccaagaccagtgaggggcaaagggagtgggtttgacgttttgttttgttttgtttgagacagggtctcactgtgtcacccaggctggagtgcagtggtgcaatctcaccacactgtaatctctgcctcctggggtgaagtgattctcccacctcagcctcctgagtagctggaactacaggcacacaccactacacctggctaaatttttgtattttttatagagacaggtcttactatgttgcccaggctggtttcgaactcctgagagctcaagtgatccacctgcctcagccaccaaagtgctgagattacaagcctgagccaccgtgtctggccaggtttgacttttaacacaagccacgaggcacacatgacatccccttcgaggaatctgggcagcatctcacctcgaagagacagaaaagtcaccctccccaacagatccacctccggccactcttccccacccacactcccccaactgctaggcaagcacagcctctgtgctctgagcctccctgatgtccttctagcccactcccacccctcccaccacacgcccttcctgtcatcctccaggcaggcagcagcagagcagaccgtcatccccatccttcccaaatggctccctctggctgcctgggaacggctggtcactgaggaacagcaggaagctccccgccgacccctgctctgctctaaggcggcctctcagccatggggccttgccatgctggagataaccgacggctgtgcggtcagaggtttgagacagccggtggctggtgacagagagctactacttcatctggtgagcagagctgttcccctccctccaggtggctctcacaggcgctcccgtgctcatccccacaaaccaatgccctccctcagggctggtgtgtttcagttctttactttctgccaaaagtccaaggccacgaaacatctgccaaaacctcttagataaattagctaagcagatagcagtttacactgagaaagatcccattcagagctaaaggtggggaacactcagggaaggcacgagagcagtgagtgctgccaaggccaggtctggctcttacgctctgcggggtcctggagaagcgggtgcaggagggctctgggggtgccatggtacagccgcaacctggaagacaggacccagagaacagtcgtcagccacgtgcgcacttctcagaaggaaagcacatggaggcctcagccaccaccacgcccactagagctttctaaactccaccagtcccatcctctgcggaaggcagaggcagctgaggccagcagcagctccccaagccgttggtgcttgtggccaagcatgtctggcacacacgcagccccaaccaaggcagcctgagaattgaggagctttcctggaaaacaccatggaaatttacaaaactctgaaatgtctcaagacaacatctgaggaatttccacagctgtatatctggagcagtggttctcaaccagcgatgattctgctccctaaggcacatttggcaatgtctggagacattttttttcgtttgtcacaacagggccagggagcagggaggcagtgccctggcatctagtgcgttgccagggatgctgataaacatcctacagcacagacgacagccccgcgacagcaaacaattatccattcgcaagtcagtggtgtcaagcttgagaaaccctgacttggagtaaacatgtaggctttaaccctagctgaaaggatgatgcgccagcctatccacccgtatgcccggctcctacacagagcctggcacgcgacagacactcagccagcgtgtgctgaatgaacacctactgcctgccaggcacctgtgaaaaacacatcgctcaatattcaagcagaacttacgagatatgcattatcattactcctcatatacagatgaataaattcagggtccaagagctcaaatcacttacctgaagtcccacagagaatcagtgctagagtacaactttggcccatatccatactacctcaaatccatcactggtggtcaaagccagcccttactccggcctaaagaacaattccttaagtcacttagaaatggcaaacccagccggacacagcggctcacgtctgtaatcccaacactttgggtggctgaggcgagcagatctcttgagcccaggagttcaagaccagcctgggcaacatagggagatcccgtctctactaaaaacacaaaaattagccaggcatggtggcacagacctgtaatcccagctacgtgggaggatgacacacaggaatcgcttgaggctggaggcggaggtggcagtgagccaatgttgcaccactgcactacagcctgggtgacagagcaagaccctgtctcgaagaaaaaaaaaaaggcaaacccccaagcaagacacatcccacactatgctattatggacacacaactttagatgacaaatgtacagccttctactgccaccataagacgagcagttaaaccaccatagaaagatgctggaatctggccaggcgcaaaaccccatctctactaaaaatacaaaaattagccagacatggtagcaggtgcatcacttgaggtcaggagttcgagactagcctggccaacatggcaaaaccccgtctctactaaaaatacaaaaatcagctgggcgtggcacctgtaatcccacctacttgggaggctgaggcacgagaatcgctcgaacccaggaagcggaggttgcagtgagccgacattacaccactgcactctagcctggttgacagagtgagaatctgtctcaaaaaaaaaaaaaaagacagacgctggaaaaccccagggttgtagaaacaaggcaggtaccttttgtcctgggaagcagagataggagagtccggctggttgctgaagatccgaagaattccaaacccacaggacaatgtctggaggctcccatcccgtttcttgccctcagcgaccacttccaccacagccacgatatgagggtggtttagggatgtgtgaaaatacaagggctgcagaacagaagccagaggatggtctgagtgttcaggacacacacaaagaggacatgggcgctgtccccacccccgagaccgccttcctacacgtgccacagcatccggaaccctctaccatgccctcatgtggtgtaccacatctctgcaggatgccagggaagcaggcacactgaggtaactccctcagactgaaatgttggtgtcggagctctttattccagagcacccaacaaccagggcatcagatgtctgcttccgctccaggaactttccattccctaggaattccaccacaagaaacaccaacagatcccaggcccactagagcagaatggggctagagcagctatgcacccaaccctgcagggggacacaccaggtaggaccatggttagatcagcccaagacgtaacacatccaccactaaaaagacacgcacgtgctgatcaattcatgctcctagtatcgcctgacactcaacacagacaacttcgatcacaccttcccagtgctgcttcgtgcgtaaccattttgagttccatctgaactgtatttaaactattaacaagaagaatccttgaatttctttaggtgctaagtaattatccccggttcagagcccaaaagactaaagtctttttatgccgaaaatcaccttgagatcattttattaaaagatttctcaagatgtaagccaagtagatgatattcaaattgatcttaaaaggttttccactcacaccttcccattcccaacatgcaaatggccagcctctgcctccgccttcctgccaggcccagggagaggaggcctgggaagacagcacaggagactcaaacccctctctgcatctcatacgggcgctcccacttgggaatgaaagcaccttcactctgctgctgcttttctattgcgttaaattcaatgcagttgtttttatttaaaataattaaggggcctggggtggtggctcgcacctgtaatcccagcacttttgggaggtcaaggcaggaggatcacttgagctcaggagttcaagatcacctggcaacatagccaaacaccatccctatgaaaaatacaaaaattagccaggcatggtggtgcacacctgtggtcccagctacttaggaggctgagacaggaggatcacttgagcctgggaagcagaggttgcagtaagccgagatcacgccaccgcactccagcctgggcagcagagtgcaactttgtctaataaaaagaaagaaagaaggaatgccgtagcacagtagacagagatgaagacactgactgagtttgctaatcaacagggaatgcgcatccccaggcatcaggagtggtgctgagcccataccccaacaccccagctggggggcaaagcacaggtcaccagctgagcacagagaccgcccccataaggcacaaagaggtaaggagagccgaggctggtcttccgctctatgacttaaacttggaataatcctcctattaacgagtcattaccatggtgtcaccgagaaaacgtttactgtaatcacagactgtcagcccaggataacagagagatgcattaaaacatcagccatgagatataaatcgttattctattatcttttattgcaatatgatgaaataatgaccacttacagctgacaggtggttggactaagagagaattatgtttgtttccaagactccagaaccgcttttaaaaagccccactgcaaagtcgagttggtcattaactcaccttttctatttatacctgtgcttatcagtcttacgaacactactcactttttctattggcaataaacattttcaactctgatacccagcaacaacaatctgccagcctagaggtcaccctgaaattactctacctgaaccgggtggaacctgccgctacgggcatgtcccaaatacaagtttatggctatgcctctcccttctgtttaccactaaaaataatcactctgaggccaaaaacaacaacaacagcaacagagccccagagctgcttgtctcagctgatccaaccttagaatctaaagaatccatctttaatcagaagagtcagccgctccaagtgcagcatgtttgaaaagttcagatggttgtaccagtacaattactgattgataaggacatatgttcttttccaaaaatcatttattgaccctccagtgtgggaacagccccaagctaaagaatttataacgaacctggaaaacacaagtcagctttcaagaagctcgagcctcgaaggcttcataaacgacagatgaggcaggcacaaaactgcgagcaacagagccacatggctgcacccctcgggtcaccccagcaaagtcatattcgaccaggtcaccggtgcctgaccacccaattcccgcctcactcagccaggcagcacccagctgaggaatacctgtacacacatccttcagtctagggaaacttaacgagcgccactgccatacatttggaaaggaacattctctacatcaactgaaactgcactattaaaaggttaagtcaagcccatcaaatcgcctgcagggcaaggtcactggagacagagggagacgggctctctgtcacccctgcctcgcagctcacttatctgcactggtcaagtttcctccttgacagcataaacagattaataaatcatttaaatgctcctgtcttaatgccttcatcttcaaaaacacggacaccattttgcctcggggcccagtttccatttttcacccgcagtgatggaagtggaattgggcctctgccgatgtgcctggatgaagaggccgcagccgggcaccccccatggcacggccacatgacctggcacctgcatgacatgggctcctcagacaacgctgggcagcaaggccagagaggagctgagcaggaacagaatgagtcccttccaaagaactgttttaataagcctttaacaggatatcttcagccaggcaaacaatgcagagacttcatgcagttcctaccctctggctcagactcacactgcgggttcggagggcttcccagacactacccctcaaagacagcagggatcgggggagcccagatttccacagcaaagcatcatgacagggacagggacagccccctgccccacgaattatccagcccacaatgtcagcagtgccaaggttgagaaactctcatttggagtaaaaatgtaaactttaatcctggctgaaaggataatacaacatcttatccatctctgcacttccagctcctaaacacagcctggcacacagaagacccttaaccaacatttcttgaataaaaactactgcccactgggtccctgcttatggaaaagcacatgactaaatactccagcagcacttaggggatgcacactctttatctctcatgagcaaatgaatcaagtcaggaggagcttatttttttcttgcaaattaatttaatttctttctttcttttttttcataggtttttggggaacaggtggtatttggttacatgaggaagctctttagtggtgatctgtgagattacggtgcacccatcacccgagcagtatccactgaacctaatttgtagggtttttttttgtttggtttttcttttttttgacagagtcttgctctatcacccaggctggagtgcagtggcgtgaatctcagctcactgcaacctccacccgccgagctcaggtgattctctagcctcagcctcccaagtagctgggattacgcgtgtgtgccaccacgcccagctaatctttaaatttttagtagagacagggtttcaccatgttggccaggctggtctcaaattcctgatctcaagtgatccatccacctgggcctcccaaagtgctgggattacaggcatgagccactgcacccggcctcaatttgtagtcttttatccctcaccctctaggatcaaggagtttaaagcacttgtctgaagtcccactgggatcagtgatggagtaggacactagcccatcctacctcaactccgacgcccatggcgaaagccagttctccctctggcctaaagagcaactccttggcttacttagaaaagtaagtgagcagacatgattataacccaaagcaagaaatatctaaccccagctctaccaaaataaaaacatttagctgggtctggtgatgcatgcctgtagtcccagctacttgggaggctgaggagggaggatcacttgagcccaggagtccaaggctgcaatgagctatgatcgcaccattgcactccagcctgggcaacatagtgagaccccatctcttagaaaagaaagatcccacactatgctgctgtgaacacacaacaacaaaattgacaaacttacagctttccattgtccccagatgactgacagttcaatcactgtacaattaaacactggaaacgtcacagagaccaatcatttctccttctgaaaaccattttctttcatcctctcatttcaggttccaagactacggcagtggtttccattgtgccagagaggaaatcagccctccccagctgcaaacagacaggcacacagggcccgagttggcctcctagagccatagagcctccctctgtggaagcagctcgctgggacacgaagccagcttcttgcttttgttgtgatgatgttcaggacatgcctgccctctgccgagcaacagcaagagcacaggagcagccatcgggctctgcagccagggcttcctgcaagctccagagccaggcccaagaatccaggccctggaagggctcgcaggagtttcacgtgggttatgctgatactccttgacagcatccacttttcaatgggaaattatagcacgctcattgctctgacgagtaagagccgctcaagaggggctttctcatggctgtgatgacgggaagagacacaacccaatcacctgcatccctctaccagggcaggtgactgccccgctgctttggcgacactggggctggtgcgctctgggaggaaagattcccttgatgggggtttaagctgttgctggagaatcacgaggattcctgcccagtaactccccccaaataaataaaggagggaaaagaagccagtcacactacaccggccacacacagtcattaaggaaagaatccaagggaaaagtatgtccacctcaaaaagaaaactgagaaactgcacaggaccgtggcctccagcattattttttaaaagacacttttttagaagttgaatgaatgattcgctggctcagaggaagtggaggcaattcctccccaccaggaaaggtctcagagaacacagaattctgagctcagagctgagacgtgtctggggactgctctcctgcatatgggcccagtgcaaataattcatcatttgcagaaaaaaaaaaaaaaaaccacccagctctggatcaagacaagccttctgtgttccaagtctctttcaggacatcgttgtttgcaaaatcatgccacagccccctctctcggggtcatgtgtgacatgggcactccacaaaacctgagcatgcagggtccatgcgctaccacgtgggggctggacagccacgggcgctccaaatgcggtcccctgctaccggcagctcaccaaccccaaagcagatccccccaaaccaatgctgataggcaaagaccagaaaaacacaggcaattagtaaagccagagaaagatctctgccaagtctcagaatcacccctaaaaagggcaaagggtgttttacgaacctctatttccacaggggtgtagacagagcaattagcagacagggtgcgaacatgctgccacaccctcatgcctaagaatgcccactcctgggagcactcggtgcttcatccacacttgggagcacatacatgtgtacatggatgtgcacacatgtttgcacacacagttaaataactagttaactaagctggaacaaaacctttgctctgtatgagaatgccaagcacatggaggaaactgcctggtacagaacacgctgctcaacagcttggcaggagggattcattcctggggcaccactggcctctgctgcccacacggggcatagcagctgcagacagcaggctccatgaatagcacgggggcttcagcatcaccctcacagctgaaagtgccctggccacaccacactgtccttgctgcattcccttcttcagcgattccaagtccaagggtgcagatttttccagaggttttaaggactatgttccactagtcccccgggcccatccccagcctcaacaggagacgcacccagatgacaggccaaggctgagccacgtggctcccacagtcggctgcccttggagccaccagcacaggtattccagactccgaaaagccaccagctcctagtctccctaacacatctgaattgtgaactgcacaggcagcatgacacgcagctgccaggatgtggtgaaatgcaagtgctgcccaacttccgccgcaacggaagccctcggagtgcatgaacataatcccgagaagggcagagagaggcatccattccaaagatcgtcctaccatgtgactggaattctacagggatcaggattctacagcccagagagtagggagatggaagcccccgcttctggcctgcgcagcacggatccttaggaaggtccgaagcctctctaaagggagagctgaagtcagaggggttgagggaggaggagggaactggccccagcacctcggtgactgcaaggcatccctggtttcagagcatactccatccctcagcattctacagaacacttcagaacaaaatgcagggctcctcagaagcaggaggtcacggaggccacagcaggtggagccgtcagatgcacagggccgtcgctcccacccccacccgccacatgggaataagctggtggagttattccatctccatgcacctcagtgtcctcctctttaaaatgggtacacaggatactgacctccacaggaggatgacaggcatgaaatgacggcatgcttctgagccgatgcctggccacgggaagcgcctcccggtgaaggatggctaacttcaccacccgccgcatggctgtcacaacaccaggtttcggggggctcactgtgcacatctgagaaagctaaagctaaacagctctatccccagcagttggtctggcattgccagcaccgggaactcatggcgagcctcctgccacagcgcaggcccgaggggaccccctgcccgcgctgaaacagcactctaagggttcatccgcagtcacactcatgaaacctttcctgacacggctggccagagagacctctgagaggtatttgcattagctgtttgacaaccttaatgtcagacacatccttagctgtccagacatacactctagcaaggctttttattgaagcttcgtgacctctggggtcattctctccctctactacccatgggaggaagggcaagagtcaggacccatccatgtcaagacacacataatccaagcgctgggtgatggtggggtacggagagcaacgagctcgtggccctaggtgggggtgctgactggccagagcaggcccccatgggaaaggcacacctgggcagtggttacctagagtaacgtctcaaaggacggccactgtcaccgccactgttactcatcatacaaactgtcccaataccaggcctcttggggcctccttctatatacctaagatcaaaccaagacagctgagaccctctcatcacctctgttgcctccacactgtccctgctgcacacccgtcgtgctcagacaccatccctctcaaactccccccactcgagttcagctgtgaagcagcagccaggcatgggaaaggcctccatgacatcgccggctgttaagagtcaaacgtcagcgtccctaagaagaccctgtaggacccagccagaaggcacgacggggccaccctgccaaccccacccgtcagcaaacctgggctctcctctcgtcctaacacccctgggtctccctgctctgcttgaagcagcctcgtccctgcttgtcacggagtcagtttctttctcatcctgtaagtcccagcttaatcagcagcttcgcagagaggcctccctcgtcacccacctaaagcaggtctccacgttctcctattggtctccacgttctcctatcggtctcctcctgagaatttaacacaacttgcaattactctgttacctgctcagtgcgtctccgaaacagtctgcagttctgttaggtgagcgccatcatcaccctgagcctagcatgatgccctgcagagagcaggtgctgaatggaatgtatgctgtgcagtgaaccacagagacagagcatgccggcccgcagggtggccagccgcaagaccacctgagtgaaaacacgctgctcaaccagtgcccatccacctgccggtctcaagacagaaggcacaggtgtgagtccaggctctgatacctgctacctgggcaagtcactttactaaatcttagtttgtctatacaggagggagggaagaaaggaaggaaggggacggtgaaagggaaagggagggggaggggagggggaaggagaggggaggggagaggaggagagggagcagtagtggcagcagccatagatgaggtcaatcatttcccaacttattcccaagaactccaagattccttgaaggtgacaagacccccattcccctgacccttcaaccagagcagagcagagctctctcatctgtttaagacaactggcttccacataagattttgtttggtaacaaagcgcttgccgctagactaagctctgtgctgcctggacccacaagtctgagacgcgctgtgaggtctcggcaaggccccagtctctgggctgccacccaggaccacccgcacacacaccctccgccttggagcagcccctgccaccatcaccagggcccacctcattaaagacgatcctggacggcggtctcttcgtcggcttcactgtggttttccacgtcctcccaaagaagtgccggtaggtgacatcaaagaaagacactcgcagatggcattcaacctctgacagtacctccagcacgccctaggagacaacggggaattgaccctcaagagtctgagcaccatgagccaggaggtcactggcaggccatgtgggtgcatatggggccacctcgctcagatatcagcacgctggtttccttattgggaggctacctctctcccacagctactggtcttggtggggttataaaccaaagcatttggccctcccctggccaacgaaagactgcagtcccttggaacagacacaggcttctgactcagccagagcccaggacgcacaagaggacatgaccacaggagacacatgcgcctgccaggatgaggcccagggctcccagcagccaacaggtgagagagaacaagtccaggggacatcacctgagacctcgctcaagccacacctgaagcttatgctggctgtggatttgctgtgagtcaacaaatcgcctctcacgtaaatcattttggatgggtttgttaatcatttccaaccaaatgagcccttcctgatataaccagaaactaaatcctcaacttcccagattttggggtgacattggcaaagcaaaaagcagatctttgagaattgagaaatcatggctacaaatacagaacaaagcagccagagtgtagacaggcaggaccctgcccagagcggcagccagagtgtagacaggcaggaccctgccccggagctttaccacttacagcaagtattgctttagccttttctcttctgtgacaggttcttacctgagacaagagtcctccacctttctttcacctattcacttagtaaacgttacttacacatctattctgcgcattgactctctgccaggcacatttccaggcactagggaaacaacaaggaacagacaaaatctctgcccttacagggcttacatggtgaagaacggggagagaggtgggtggggcggggcagggcagggcagggcaggctctctgagatgatccttgagctgagaacaaggggggcatgagaagaaccacagggagtttggggagagggagccaggcaggaggagcagcaaactcaaaggtcctgagaggaagagagcacacgtgctccaggagccagcgagaagtgcaggaactatatttagctatagtacctgtgttttgtttttgtttttaagaaaagggtctcgtctgtcacccaggctggaggtctggccactgcagcctccacctcccaggctcaagcaatcctcctgcctcatcctgtcaagtagctgggaccacaggtgcactccaccacacccggctaatttttgtactttttgtagagagtgggttttgccaggctggtcttgatctcctgtcctcaagtgacccgcccgtctcggcctcccaaagtgctggggttacaggggtaagccaccatgcccggcctgtattttctaattttctgtattactgatgctctggcatctggggcctcagtgacgagataagactgtcccccagagccggttaattcctagggtggcaaatggcaggcctatcagaatgtgtctgacatgaaaaccaacccgtccagagaccacatgccccactacctctgtctggctcacacaccccaggagtcccaccctctgccatggtctctcagggtcagtgaccagacacctcgggccatccctgcacctcagagaccacgacatgactctccttggccaacgcaagcccgtccagctgcccaccctccctggcccagtcctcccacaaaaccataatcaagtctctgcccatgcctcccttccaccctcctgcctcctgaccaaccctgcgcttccccaggtggcctgtgggacatggcctacccctcgtcttgggagccctgagtaacagacagggtctcagctgagttgtctcctgatccgctggcctcaccacccctaaatggaaaccagtcccaggtacattctaagcagaaagcccaccggactgcagcaggctgggccagggaggagagaaggaatgagcgccaggcgcaagagcgttcaggcaggcctcacggcgcgaggagaagctgggttctcactccaatcatgcagggaggccagggagagattctaagcagaaatgacacaatctggttcgggatttaagaaaattcccgcagctgccatgtgggggcgggagtggaagcaggggccaattaggaggaggcgagacagggaggggcagggagggtgacaggaagcaggcaccgctgggctctgctgctttgcaggagtggctgcgtggtcatgaagggagaaaagtgggaagggccagctgcctaggtcggcccagccctcccaggcccagtactgaatctcgcatctcaagtgaagcaacgtggagggaggtggtgttatccatgaggacagggaaggtgggcagagcaggtctgaagactccaagcccagctcccatcaccacgcaccggggcctggcccccagctcccattaccacgctacctccctgtcctcctccctcttcccctcagtctctcttcctcctcagctcctcccgcatccagacctgccctctgagcctgcctcatctctccccagagcaaccccctggcttttccatgttgactgtctgctgcccccatctacaacgtgagctctctgaggacacaagcctgaaatagtctgttccctgctctgtccctggggcctaggcaaagcttctgcacgtgcccctcctcacccgggactgcctgggttcccccagcaccgccacctcctcctcctcctctcctgcactctcaggaggccattctcaggcaggatcccgtggctcccagaaccgtcgctggcttgggcttctttccagaatgccagatcctaaccaccctcccaccacctctatgctacttcacatccagtctattcaaataagaatccactgagagcttcctgaagacacagtatagggcagagtcaactctgtgtcatctgcacggttcctaacatatcgtggtgcccaatacatatcaagctgaactgaaatactcatcccaaaataaagaaatataagcaatgatcatggtaaaattaaacaaaaaaagtaaatgggacagtaaaagaaatatactaaaatcattaataaagtgccctgaattcaaaacaagcatgtaatattcttcagccaacacctttcacagggaagcaagctttggccattatctaaagctatcaattctcaaaacaactaaaattatacaaacttataagactatctataccaaaccatcatctatttccaaactctatttatagaatttatatgaattctatttatcttcttttaaatactgtattttgattgatctttgtaaataaaacaacgttgcattcctgcagtaagccccacttgatcctaataccccatcttttatacatattgctggctttgctgtcttaatattttcagggctgctgtgttaatattcatgagggatacaagtctgtacttttttttgtagtgcccttgactgggtatcagaattatggtggcctcaaaaaatgagctgggaagtgttccctcctcctctattttctgagtttgtctagaattcgtcttatttcttcctttagtatctgataaaattcaacattgtatttttaacctctgtagcgtacgttatcatgatgcttctttcattttaatactggtagtctgtgttttcttttttttttgtcttgatcaattttatcaatcttttcagagaatcaacttctggctttgctgattttctctattatttgtcctttattgatttctgctcatatacagtcatgtgtaacataatgacatttcgatcagcaacagactgtatatatgactggccccttaagattgtaatattatatttttactgttttttctatgtttgatataccgttgtgttacaattgccaatggtattcagtacagtaatgtgccatacaggtttgtagcctagaagcaacaggctataccatggagcctaggtgtgaggcaggctctaccctctaggtttacgtaagtacatcctatgatgtttgcacaatgacaaaatcacctaacaccatttctcagaatgtgtcggcactgtcaaggaaccatgcataactgtatttaccatttccttccttctagttactttgtatctaatttgttcctttatttaggtttgtatctaatttgttcctttatttaggttgttaaggaggaaacagacgtcactgattttataccttcttcttttctaatatagtcatgtaaagctatacatttccctcaaagaactgtattagttatatcctataaatctgtatattttcttccattactcagttcaaattattttctaatttccctattaattcttctttgatccagtatgttaatttcctatttgaggattttctagatctcatattatttatttctaacttaaaagcacagtagtcgataaacatactctataatttgggtcctttgaagcttattgggacattttaatggcccagcatacggtctatcttggtgactgttccatatgaacttgggaagaacgtgttctctagctttgttgggagtggtgtttaagagatgacagggtgattgatggtacacttgggaagaatgtgtactctagctttcttgggagtagcgttaagagatgacaaggtgattgacggtattcttcagagcttccaaatccctatgagtgttctgatctatctgttttttcaataattgagagaagaagagttaaaagtctccaaccatgattatgaatctgaatatagttccctttagttctgtccaattttgctcttttgtacaaaagagttatcagaacagaccttactgttatgctttgaaagaccagcttagaagtctgcccttttgctggagtctgggaacttagatttcaagagagttcctaccacctaactggtaagaggagctcactgtgcctaaactgtttatgtactgtggcttatgctaaacacgtgtttcccttctgagagtctggaattttggacatgctacacaacatttcacgtgtgttgttacaattcattgctggaggaatcaaacgcatcctgtgtgactcaactgagagaggactcttggaagcttgtaccctcttccctcagacatcccccatatgcctcctccctttgctgatcttgctctgtatccttctgctggatcaaccttagctgagagtatgactacatgctgagtcatgtgagtcctcttagagactcttcaaacctgggaggtggtcttggaggcccctaacacaagtgcatacacatttagagattgttacgtttccttgatgatcactgtctttatgaggtgcccctttatttctgggaatactcttcaccttgaaatctactttttctgatactagtatagatgcaaagctttctttgcttagtatgtacatggtttatatttttccacccttctacctgcaacctgtttacgtctttatgcttagagtgcacttttttgtaaacaacatgtaattgggttttaaataacttttaacatacgactttggatcaggaattccacttctaggaattattctacagacatatctgtacatgaaaaaaatgaggttattcactgtagcagtgcctataatagcaaatgactgggaaaagtctaaatgttcatcaatcacggcctcactcaataaatgatggctcattcatataaagaaacaccttgcggtcttaagaacaataaaattttcttcatgtaataacatgaatgatcgataagacatactgcctgaatttttttgaaaagcaaggtacagtgccgggcatgtggctacacctgtaatcccagcactttgggaggtagaggcgggcagatcacctgagctcaggagtttgaaaccagcctggccaacatggtgaaaccccgactctaccaaaaatacaaaaacttagccgggcatggtggcgcacatctgtggtcccagctacttgggaggctgaggaaggaggatcacttgagctcagggggaggaggtttacagtgagctgagatcacaccactgcactacagcctgggtgacagagtgagacttcatctcaaaaaaaaagaaagaatggtacagaacggaatacaggaagtaccatttgcattttaaaaaggaaaaataaatgtaggtatatttacttgtatttgcttagaatttaagaaagttgtacgaaaacacactgtatctagggtgatacaccaggtgcctggggatgccatgggatgattcacttttcctctgcatccttgtcaactttgaactacgtgcattaccttttcacaaataaaaataaaatgaaatggggaaataaaatttcctttgcaaaactcctaggaaagagggaagggctatcaactatcctgtgagcttctggaaggcggctgagccagaccaggagggtggcatcccagctaaagccgtcgccctgggcagctggcttcactcttaattagcaggtgctgctgctcgtctataaaacgggagtaaggtggtggcagcctcatagagctgctctgaggattaagtgaatgaacacagtgaagtgctagaagtaaagctacaaaagcagcagccaccacagtacctaccacagtggcaaagacacagcaggtgctcaatccaagggcttggaattgaacgatatagaacatcagtgatttaataatagtaaattagtcacagacccggggctccaacaactgaatatatgtgaatatcactctcccagctgcagaggaaaacggccttgccaagccaaatcctgtaaaaagggttgacaatggcaagactgatccttctcacgcattcccaccggccactgggcctcacgaggacaatccaatcgtgtgggtgtcccgtgggcagcagcacagaagcaccagcttgtccagcaggttccccgccagctgaagggcacagatggatgtgccgccatcagggcctgggcctgagtgtgcccaaggccgtggtacatccagccacgcacagagctgccagaatgcccgtagctcagcccctgcagtcctcactgccaggctgaaagcgggccatgctgagccatgcacaaggccacctggctcacaaataacccaggaaatcagagtacttgggtttttaaattgctccactgtgggcagaaagaaaccctacccagagtcaaaagtgctgaccatgtcattgaatcatagattctctttgctgatgggccactttgcatccgaatactgccaaggcccaaggtaatgggtatggtggtataagactcaaacgagtaagtgaaaatcaatacagatgctctttgacctatgatgggactctatcctgtttaagttgaaaatgtcataagttcaaatgcatttaatacccttaacctactgtacatcagagcttagcgtggcccagcttcaacatggtcagaacacttgcatgttcctacaactgggcaaagtcatctaacacaaatcctatttttaaataaaatgttgggtatctcctgtaatatattgaaaacagcactgaaagtgaaaaacagaatggctatatgggtaccaccataaagtagcaaaatcaaaaatcaaagcatcgtaagccagggaccatccatctgttaactggaagcctcatgtcagctaagagcaataacacgcatttgctaacagcacattttgttacctgcctaattaccggtccgtccagccacttgaggacacactggaatgccgtggattccttccaaggctggcgcgctctctgtgggtggggagggacaagcacgttttgggtgaagatcctgtgccagtcgttcatcctgcccgcctgagggtcccgtgggcttcccggatgatctgtgccagtcgtattcaaataaagagaagagctgtgagggctacagtggtcacagcaatcctgaaggcttctgcctcccactaaatcccagaggaacctccatcccccaaacccacactctgcaaaccccagaagagtggactttgttgctggctggcacccatgctgcctcctctaggaagtaccatttgcatttcaaaaaggaaaaataaacgtagatatatttatttgtatttgcttagaatttatgaaagctgtacaataacacactgtatctagggtgatacaccaggtacctggggtcaacatgggatgattcacttttcctgtgtatccttgtcaactttgaactatgcgaattaccttttcagaaataaaaataaaatggagaaataaaatctacctccagagaaccctccgccccacccctacccccgtgggccagactcagggcacgactctcctgacctctgtggctggttccggatggggacatgaagggatgttttattcagctgtgtaagttggataccacacaaggacaccaggggtgggtggctgctgaaatacagtcctagcgttaagactgtcttgtaggggacccagggagcatgagagagggaatacagcccttgggccaagaggtggtcagcctgaaactgcccggggccaccttaggacacacataaaaacaagcagagaggaaaaggtaggagtgagggccactgggtccccatgtcattattagagacctcagttggtcaccccacgacacttcagctacatgaacaaagtctcttgttgctaaagccatttggggacaggtttcaggtgttaccagcttcttggtgggtcttggcccgttttgagtgttatctgatcctgtccagccagaccgggatctaaatcttctctagccaacacagaatccaaagatctgaacctcaagaagaggttgaattccgtaaactaaaatggcgagtaaggagaaaaagaagtgggtttggccttctaagacagcagctctctaagtacattccccaaacccaaggttcaacaggatcctgtcaggggctctacaaggtcaaaactattttcatgacacccaggtgttatctctttcaccatggtggcatggtggggcagaggcagcagcagggaaagccactggggcctcactcaacccaaggctggttgggttgagtgaggtcctcccaacctctcacagaaaagaacaaggcagcttcaagtaagaacatccttggtgaagccggaaaaactattaatcttattacttcttgacctttgagtacacacgttcttaattttgtgagacgaaatggaaaatacacaacaagcatttctgctgcaaactgaaaggcaacagtcatccccggggaagcctggctgtgactgggctgcatgctgaacacaccgcttttattattcaacaccattttcactaagaagaatgactgagagacaaacatgggtacttggcagacatcttctcaaacgtgaacaaagttagcatgtcacttccgggaaaacaactgcaacaaaaatggagtttccaagcaaaaatgagaattaagaacatttgtatcctctaccatgagcctactagcttcacacttcttcaagactttcctgatgagaggggcagtgatataacgtgatcttctaaggttacaccattaaatgtgtcaatagttggaaggtctgcatgactccgtgaaccaatattttctgaacaatgcgtaatggtacaaaatcctgcaagaagaaaacatccacccaaagtgcaagacagaccaaaggagtttaatgtcagagcacgaagagttcattcacatggtggagactctgctttagaacaaatccttaagaaacttctgctcgtagggtttcaatgcagcagcaaagaatatccacaatgacccaagagactcctccctaactagatcgggatggatttccttcacatacttcaaccaaggcaacacaaggcaacagactgagtacagaagcaaacaggagccttcagctgtcctctcttaaggagactgtaaagatatttgcaagaatgcaaaagaatcccactcttctaaatttttttttgttttggataatatagttggtttttgtaaaaaatgtttttatgttaacatgtcacagccttatttttaaataaattaatatttttaacatttctcagttttaacttctatggcagtaaacattggtagatataactcacataaacaaaagttctttggggtcctcaataatcttttaaagggtaaagggatctgagaccaaaaagtttgagaagggttgtgctaatggttcaccccctgcatgctcccggcatgtgtgggaaccgagaggacatgaccaggcagcctgagaggggccttggcccagggtcccgcctccacccacagtgcacccagacgctgcatccttggcccagggtcccgcctccacccacagtgcacccagacgctgcatccttggcccagcgtcccgcctccacccacagtgcacgcagatgctgcatgtgggccaggtattcctgaggaccagactcagtctggtcctgtgtgaatccagcaggcacacatgctggtttgttcctttttgttctctgtgggctatttttgtcgctcaacttcccttgttttgtggaggaccctgacccaattccatgtatggggagagctgctccccgattccagccagagactgcagtgattgcttcaaggaggaacacatggcccacactgagccatcagtcttccccgggagacttgagcccaggatgtctctcctccaatgcccacaactgcccacaccatgccagcccagagccccaggagccaccacagggagagccgactttggacttctgaccggcctaactggaaaagaacaaatttgtgctacttttaagcaaccaagtctgtgggactttcttacaggagccacaggaaatcatacagctgtccacgacttataagcagaagacacctgaccaataccagctcaagggccatctcccccaggagggcttcccaggtgctcccagggtccaggccccaggctcacatggcccctgtgcttcccttggtcacatcattcgtcacctatcttgtgttgaattgctcgctggccaagttcttgaagaaagaagcctcattcctcctgtgttcttggtaccgtcacaactcagtaaatggtcacggaaccaaacagaagctttagcaaagctaccctcaagcttttctttcccactgatgttttataacattcagaaatgtattcacacacaatgcaggccgtgatggccccaggtggggatttcagagaggaagtctctcctgacgcagatgcccatgctcctcacctgccccagatttctgacccggtgcctcctgccctctccctgggtgtctgcaggactcagtgccacacttggcccaaggacactgctgaaggacgtgcatacgccagtcgaccctcacagggagcatgaagcatgccggccccctgctgtactaggagggcagacactaggcggaagggcatccattccgaaagcacctgccacccacacggaagtcctgaggctcgggatgtggaggcagggcagtcctagtctgaggggccacggaggccgaggtgacacctgagactctgcaggtgggagcccaagcgcccgcagcagctctcactgccatcccagcacctcacaaacctctccgggtgcccttccacctgctccttgctcctttccacctctgctctggcctctaggagtcaaaccaaatgctccctcctcagagcgagagccccatcccccacctccggctgctcccacacagggcaggtgacagaagagccaccacgcttcaccagggctgtgctgtagtcctgcgagactgtgagctccatgacaccaggctgggtcttcagcaaaagtcttttaaggatgaaatacaaatgccctggaggaagtgcagaggggcctttggggccaaatcaacaataaaagagaaaatcgagaaggctccaggtcttgaacccaagaaaagggtacagtgggctctccaggggaaaaaaaaaaagaagaagaagaaaatacacccacttttaatgagcccctgatgcaagacaggaactcacattctatggttactattccaacaactctgccaaatgagaatcatcattatcgccatcttacagatgagaacactgagactcagaaaggataaacagccaatccaaggtcacacagctagctattataactagctattataatagtattatagatataatactgtaagctattataactacctcccactacctcaatcaaggaggccaggagaggccaagggagaagagaggcccagagggaaaaagtaagagcaccaaaggaacccagggctaatgctgtctcctctttaacttcaggacagattcgcagcctccccacctgtttccaacctccaaaatgagagctgtgaaatctccttgagatctctgcttctgctgatctattcagcaactatttcccgagcacttgtgttccagtgcataagaaggctgtcaaatgtgctgtcttcaagcatctagaaagccagtgggggagaaagacaagaaagtgactgtgagcagcaacaggcccccgggagggtgcagaggtgagcagggctgaaggaagatgcagggggtgggaggcgctgtcagggtccgggaagcctccttcccggaatggaaaatgtgtaatgcctgagacccagatgccttggggagcttttggggaagcagaggtctgattaagcactgcctggaattccctcattcatgagcattctttcagcacctaccctgcgcccgggagaaacggtcttgaacacagcagacaagctcgctacccccatagaatgtaaagaaacggggcacaaattagcatacaaaaagacacaagtgtgacctacggaaactgcacagaggaggtgcaacgaacggagccctgggttaggaccgggaggcgctgcccaccatcaacagaaatactcctccttttgccaactacacacgcgagaggctggatttccttcacagacgtccaccaaagccacacatcgcgacacacggaggcagaaagcagcggtctcctaagaagttagacacgaggaatctcgggcagcgaggtgcctgcaagcccgggggcgggcgggagcagcctgcacgcgtggggaagggcacgcgggagcgggtggcgccttccgggccgggtcggccgggaggttccaaggcaggaaaggggcgcagaaggccgggacggcgccgggtacaaagcctcgcagggacgcccgaaggccgcagagccaccgcggggaactgacagccggagccggagctggagccggggggcggggaggaggggcggaggggcgcggccaggcggggtccgcggactccggcctgggaaggatgcgcgcggactagggcgcggggagccaaggcccagaacatcggtaccgcgctcccttcagccgaggggctgcagagaggccagggggcagggggcagggggcagggggcagggggcaaagggcaagggcagaaaggaacccacgtagccaaacggcacccagcggccccgaccccaagtgtcccgacgaggggggacgcctgcgactaacgcggggacagcccccgccgcgcgccaccgccgcaccccaggcaccgggcccccacgcagggacggcgtggaccaccctacccccgaaccccgaggctctggccaacactgaggccccctgtgcctcgaggccgcgtccaacctcccccgcggcgccggcccacatggttccgcccgccgcgggccgcgttacctaggagaccgacccgccgcggccgcgccggaggccacggagcccacgcttttcagagagtctccactcgacggacccagaggcccggcggccggtgctcaacggagccacaagcctgaggaccgaggactggccgaggggcgcgccccgtccgctgccacccgcgggaggagcctcggaaggcggcgcaccgcgccgcacactcagtccaagaacccgcctcgcgtcactgtcgccgtcagggccgcggagccaatcagagcccaagtcgagggctgcgctttgcgagcgccagccaatcggtgcggcggcgggcccatcctgatttgcatgtccgacgacccctcaaccaatggtaatgtgactggcgtgaacaatagccaatcagaagctggaagaggcgtggccccgggcgtcccacgaggtgaagatgctgctggcggaacctgcaggagctagcgggattcgggggcgctaaagtcgcaggggcagggcgggaaggaagatccggcgcggggcacaggatccggagctggagcccccaggtgagtaccggggagaccccggcggggcgcgctttccaccaagctgctccgggacggcggcggcgggtatccgcgaggcccgcgctgcggcaggcgccgcggtcccgtctccatctcttcttccccggccctgcgtccctgcctccgccgctgtctcacctcctctccagcctcctcacctccttctccatcgtctcccttcccccatccctttctgtctttccttccctgtcctcccgcccgcccgacccttcagctcgcatccctgacccctgcccctgccgccgtccctcttcccggtgcacctcttccccatctctgcccgctccggtcctagcagcctcgccctcccctttcctccatcctcctctcatcccctctcccggcctctgcgcagccccaccggggcgctgctgttcccggtcctccccatctctcctcctgatcgcttctcaaggctcatccgtcgttctcgctgcctgtccctgtgtcgctccggtccctttccccaccctcccattctgcccccagcccctccgacctctccccgcgggcacgctctcaccaccttaccctgctccccaagactgtgaccctgcttcctgcaccagttcctcgggctgtttacagcacacacaccgccacttctgaccctgagcccctactcctatcttaagcttctccctcctgccaggccttggcacaaagcacttccgcacctccctacctgctgctgctcccaggatgcaaagaccccactgctgcaccgcgtcctgcggcattagcagcagccggggtacctgcccaccttcccaccccgccaaccagccgcatcctggtgtccctcctcctggcatttgtcctgggggctcttacagggactgtgctttgcccgcagcatcccggggtgctccaggtggaaagccccttagcacctttcctccctggccaccgtctccttccctccccacccccactttcctgctcagcctcactttgtgattcagcatttttggggttggtaactttcttgcttcctgtcgtgatagggacctggctacggagctgaaggcaggggtcttgaccctgcggttagcagggccaccttaggaaccagacctgagctgcctggttgggagggggctgaggagctggggaccgccactgggggttgtcttttcctcc

SEQ ID NO: 403 - DNA, 10941 bp, Homo sapiens
  source 1..10941: mol_type = genomic DNA
cggacatgggaaggcaatgctatgctgcccgtcagggcactgtccttccccaatcgttcaggtgttccaacaggggtggagggcctggaggagcacccgctgtcacctgtgcatgtgcctgtcccaccctgctggggcctcgggctgcccgcgctgtctttgtctctatcctctctctctctcctggagtactgaatcctgtattactccagtcccatgggtaggccctcttgtaccttcctaccacgcctgggggcccagtggaattcctgacctgtctgctgtcttccccatccctccatccccaccccaacccctccatccccattctcagccatggacacggcagagaaaaggccttgaagagccttagcctcttataggcacttgggactcccccaccctccccaatcatatgagctgtgatcccatcctccccggacccctcccttccccctcggtgatgtggggtgtatgtgtgcgttcctctgcgtgaatgtgtgagtgagtacacatggtaggggaggagccagggcgactcaggagtgccacgcacctgctctagagcggcagctgtcccagtccctgctgtggaagtgggggacagggccctctcctgggggccattggtgctaatgagggggatggccttgatgtgggtgctcagcatgcctcccccagtattggcccggggcactagggcaggcagggtggagcagcaggtgcagtatcggtgggaggacgggttgctgggaataggacgagggggccaggccaggacaaggggttgccagagccatgaccactaccccgcccccaccacccgcctctccatctcagtattgcccctcccatcactcataacacacatacctcatccagcctcctccctgctcagacttggggagggtgggggaggagcccctaccccttctcctggtggcgggtctgcagggctgggagagggcagggcgttgtgagagagagaccgtccataaggaggacagtaactcctgccctgggaactcctgggcgggggggagggggacactgcccagaggcgctactgaatgtatgagaagctggtgctgggctggggggaggggggttgtggccagaaacagggaaggaggtaggtctcttccccagggaggggtgggaccggcaggggtgacttgaggggctcctactcctgccccacgttgacaatcagtatgtctgttatgtgcgatttttcaccccgttgtgttttgggtcaggattttaaagaaagatatttttatggtaattgttgctcgtctattttactatatatttatgtaataaatatatgatgaaaataacccccttgggcaccccccttagacttgtgtgctgtttccctatatcctcccatctgctggcagagtacccaccccacaaactgaccagatggagaggtggccccccccagccttggcagtatttccaccccaccccccaaacgagcacacaccacagaagccagctcagctgtgaactattggatttgagacaggaacagaacaaatcagagggccaggggagggttgtgggggagacagagtggtttaaataggggaggaggggaagttcggtgatgggggagggaggcaggtatttacaagaaggctcagggggccagaggctcatcttggaatattttataacaatataaataagattctggtttgcttttccttttcgtctcgtaaaggagagagaagtgcagagttcgattctgtacaagggggcagcggcagaaggccggccgggcgggtcactgggcgtccacccggaaggacagcagcttctcggaatgcatgttgttcagggtccgcaggtccggcagcttgagcagcagcttggtgaagcgggaagtctccaagggccggttcttcagcaccagagcccgaagagcccgcagcagcgtctcctggagctgctccaccgaagcggaattctccatgcccgagcggtctgtggggaagacgacagcagtgaggcggactccccgagctcctctgaggaggaaccggaggtctgcgaggacctggcaggcaatgcagcctctccctgaagccccccagaaggccgatggggaaggagaaggagtgccataccttctcccaggcctctgccccaagagcaggaggtgcctgaaagctgggagcgtgggctcagcagggctggtcacctcccatcccgtaagaccaccttcccttcctcagcaggccaaacatggccagactcccttgctttttgctgtgtagttccctctgcctgggatgcccttccccctttctctgcctggcaacatcttacttgtcctttgaggccccaactcaagtgtcacctccttccccagctcccccaggcagaaatagttgtctgtgcttccttggttcatgcttctactgtgacacttatctcactgttttataattagtcgggcatgagtctgtttcccaagctagactgtgtctgaatcatgtctgtatccccagtgcccggtgcagggcctggcatagagtaggtactccataaaaggtgtgttgaattgaactgcgtctgcctcctcccccgggtcaggcgagagcctgacctacctgcagagacaagcaccaccgcggtgaagaggcccagctcctcctcggtaagcgccagggagttgagcttctcgctgaagtcgaacatggcactgagcaggtctcccatgcccatggcaccaagctcctgcaggctgtaggtggtgcggcttaggaacatcactgtctggtccttcacgttgaacaacgaagcaaagcgcaccatcagcacctaggagggaaggggaacagtcatcctgggtgtggtgggaggagcactgaccaaatcgcccctgtagtttgccagagggtttagcggtgctgccttcgatttctcagtagagtgggggttgtttctgaatggccaatgagggagcccaggtggaaggatggctttgggatccaataagcctgaatctgagtgtcagctttgtcactacctgtgaccttgggcaaggcattcaccaaagttaatctgctcttgtctagaatgggggcagcagtgcacccaaggcattatttcagtgtaatgggttgtgattaaattccagctgagatgacagaagtcccagccatcaagaggaagcagcaggagccgctcagcccctttcaccaatcaggctataaggacaaagatactgggttccaaaacctttcagaggtcctgcccaccccagacagcagggctttctgttggatccttcccaaggtcaaaagcaggaagcgtctgggtgcaatggctcacgcctgtaatcccaatactttgggagtccaaggcgggcagatcacctggggtcaggagtttgagaccagcctggccaacatggcgaaaccctgtctctaataaaaatataaaaattagccaagcgtggtggcgggaacctgtaatcccagctacttggaaggctgaggtaggagaattgcttgaacccaggaggtggaggttgcagtgagtggagatcgcaccattgcactccagcctgggcgacaagcgaaactctgtctcaaaaaaaacaaaaaccagaagcataaacggtcactcacctcaaaggtgccagccttaagcagggtgacttggtcatgctgagaaaggtcacggaagcccgggatgtgtttggcaaactctaccacctcccgcacagcgggcgtgaagctcatggagaaatcctcccagatctcctgcaccgttcgcccactgcgtccatgcgggtacatgttcataggacatgcctgggggaggaaaagattgaaggaggggagtgtcagccaggctgggtcagatggacgccccgagcagagctggaccccagattctgcctgggctaggggctgtggccctgaaggatgggtctttcagataaagtagcaattaggtgccaggtggagattagggattcccaggcagagtccagactgcaaggcaagacattttctcctgggaagatgctatccccacactcagcctccaggaacccccagctgccctacactaagtccattctgccaggcccccccaatcttcttaacgcactcgcccgcccccatgcccttaccagcagaacattctttgagttgccctgccggggactgttggcaggtgccttgccttctggggctgcatacacgtgggtggggcatagacggtgcccgttgctgttggactggtggcagctgtggtgtgcagggccaggaggccaggtgggagggtaggaggagggagcctggcgcagaccatttagggcctcgttatgacgctgggcagccaaggtgttgttgtcattgggggcaggtgggcagccctgattttcccagcgatgtggggtggtggctggagggctacctgatgcatggttggcattgaagttgccaggtgagctgcccagcttgtcatgggcgtaggtgaagatctctcgatgggcccgggccacctgggatatcacatcctccactgtgggctcagggcttggggatctgggaggcgtcagctgttgtggaaactgggagaagcccaccaggggtgaggggaccggagcagggggtggcgaggggcccatggggcctggggtggggtgctgggtgggtgaagtctccagcgggcactggctgctcaactggttgttggccaggttcatggcactctgcatctcagcaagcatccgctgcttctctcgtttggggatgcgcccaaaacgcacagctgcaacaggatgagaacagcatcaggaagttctcaaccatgctcacgtgcttctcttccttccttcctcctgaaagggcaaggccctgaaggcttggggtttcacatcaaaactaaaaccagcaagtccccacccatcaagggggtttccctaggagggattgctggtaggaggtgacccgagggaccaatgggatagaagtatatgttgacccaagcaaatgaaggatggacatcccctggcacatgtgattcacagtatgatgtgtctccatttgtgacttttttaaagggaaggattaattcagaaactttgggcggaagaaggggggaggatgtggggatgctgcctcaccgtctcgagacatgcccacagagagacacttcttgaagcgacattgctggcagcggttgcgattgatgcggacgatggagcaattctcattcttcagacaccttttgtactggatgttctgctggatgctccgacggaaaaagccctggagggcaggggtggttagtgaccacctccatcatggctgggcctctgtgtccagggggagggggccacctgcccctgcccttacccccagtccgcctcaccttgcagccctcgcaggcgtgcacaccgtagtggaagcccgaggcaacgtccccacacactttacacagtaacaccatgccattcagctctgtggaagagacgggcagcaggtgagcaggagaggccaggctgagtggccacaggtgtggaggctttctgggccggagatccagggagggaaaagctaaggaggaactccagtgttgaggggcactggagtgacaaaactgggctgaagaggggctggtgccactctaggagaaatccctgaagccagaataggtcctggcaagactggtgtcacgtaaaaacccattcccaatctggccctggcctgcttcccttcccccgaatcagctggaaaggtactcactggtgatgttgctggtgctcttgctgggggacactcggctgctgtcctccatggccacttgtagactcccaggggggctcccattatagaaggaggaggaggatgacgacgaggaagatgaggaagaaggggagccgtcatcactcaggctgggtggaatgctcccaaaggagcgagccgggtcttgggtgagggagccagtgggggatggtgggaagtaggtgggacagccttgggtcagggactggaagctgccattggagttgtcactatagagggattcagggctggtgcggcttggggaggagccactggagccaatgtaggtgatgacgccacctggagagagaacaaaaggaaagggggtgtcagccgccatgtctccggacctagggtgccactgtgctcatccccacctgtctgcccaaaacattgctggccactcagttcaccatgtggagcccctaatcttggagttaataagcaattccccaacacacagtagacatggcatggccaagcaacacctacgaccctttgcaggccaccttcagcttctgctttcagtatgaggcatgacccctgtggcatctcgcatatgtgccccccttccttagttgccttccttgggaatatcgactgcagctaatgacttagttgtcagttgaagatctggggatgggatgggcagctgagcaccattcaaagtgcccagtcctccaaaaacaaaaacccagctgctgattttaacactaagaccattccaggaatgagaccatggaccatggagagataggtagccaacagtaaagagaatggagggtttacaaaagtaagacagtcacattccccccagttggggacatatattctctgaaggaaatgaagggaaggaatctgcccagcctggttcccctggcctcttaagagagtgagccacagtggagtctatccctgtgtccaaaaaggacttcgaggtgcgagttgcaggaggtggaagtacaaactgtccagcctggggctctaaaattcccccttcagatctcagcctggtaacaatgaccttggctctctggccattcagggactttgaccctctggttacattgccaatgaggtggctgtgctcccgtggtattagcaggagaaaaaggtgacctgcctgccacacctccggcaagcacctagattggtctgccatgggcggggtgggagaagggaggatcccaggacacatgtgacctaacacatgccatgccactgtgtctgcagaggcacatgtcttgctcacccactgacacacactgaactgggcagggcggccctaaaatagctcaaggttggtcagggtgaacccagctccttggaaaatagttgcacaacagatcagctcccccggtttcagggctgaggtgggggatggaatcattagttggcagtaaatgaagttgacctagttcacccatcccccaaaaaggagtgagaccttcatgcagaggcttccaacgtggaagtgaggagcatactcaagagtctaggtctaggtctagacccatcactaccaacttattttgtgacctagaggacatcaactcccctctttgggtctcagttttcctttctgtgagaaaaaaaggacagtatcatttcagctatgattgtggggtgcagttgctttggggagcccttagtaggcaaactgcagcttgtctggtggagatgggggtaagacaatgctcgcagaactaaggagagagaagcttggggaacaggaatttgtaatgtggggaagctgagtctaaatgcagtacggtgaagtaggtgcaaataagagtgaagtggaaaggagtgagaagggtggttaggggtgaggtctctttagggagtgtaaaacagaaggccatgaaaggtcaggaatggctccatgttactttgttttggtgatgggggagggggccgggcaggcggaccggaaaaggaggcaggcgggggcggtgagtcagcccagcttcacccagatctcggcggggcggggcagggcgggagctgggccctcagccggcctcacgtccctgctccacgtgtgcctctcgcacgtggctccccaacgaggaaccccggaactcgaggccccgccctcctcgcttcccgtcaatcgagagcagtcgccccgcctcctacccgcccttccccggccaccaggtcgtgggctggaccccgaacgatagcagggccaggacaacctaggggaggagagaagggaacacgcgttgccggggcgaccgggggggcggagctcattatgtaacgaggccgggaggcaacgaccaatggggtggcagccacggcttctgctgaatgaaaacaaacgcagcacgtgggcccggctctagagccatgtgagccctcccggcggccggagccctgtaggtgccctccctcgggccgggcaccacgctctggactcctcaagtgtcgctccctcctgtcactgaggattccccagtgagatccgaacgattctcccagcccctccttccctgaaccccatcgcgccactcttctcagattccctcgcgcctgcaggaactagaggagggggaagacaagaggggagggggtccgttttctgaggccaggcatactacagctgcaggtagtggacagatggggccgtttcggggcactgttccaaagctcccagtccccctaaattcttcgcttcaccacccgtacctcctctccatttcctcctgcccagggattcgaggctcaagggagctttgggactctgaggggtggtgatggggcgtttctgagagcatttccagcccgaacaagccgctctggaaatcccacactaaagcaccgcagcacgttagcaaatctccgggccgagggacaccccagtcccttacaaagttcctctttttataaggcgtagatggaggtggggagacagtgacagggaaaagatgatagtaaagaaatctcagtacctgtgttgttgttggagtccagggtcgtcatgtcttcaccagctgagagcggtcattcaaactggaccttgactcaaactagaggttgcgatcgccgctgttgccccctgggcactggctaagggcggggagtggaccccgcgactcacgatcaggatccgaagcaccctgcagcaaggtcttggggtggccggactgcagccctgcagaagggttggacgttgaggcaacggagttctgctttgcatgggaagagcagagagagtgtgtagggggaatcagcctgcagtagttctggctagaaggtagcaaggagggtcgggtctctgcagtgtacggggtgcctctgcctgccggctccgcagcgctgcggggtggcgaatctggagctcccggtgcaaaagtcccagaggaagagaggttgcaaccaggaagtaagtaggtgatggggagaaacggggcaccgagtcgcaaagaggcgagacgtgtgccctgctacgttccctcggcagtaatatttcactctgccaatctcagccgccttttgcccgagcctttccctgggacagagggctctgcgcaggcgccagcagcccagggttcccgggccgcacgcggcactggagcaggtaccatgtgatcccagggagcgcctcgtgccccagtgacacacttttccaacagccggcacgttgagctcttgcgcgcctgcgcaacgacaagactgtcgggatttgtagtccaccgacaaagtgggcggactgcgtgcctttcccctttctgcctggcaaagcgcttgccgggacctgggaggagctgagagtggggtggggtggggtgcgctgaagagtcagggtggcgtgtttagaaagcctgtatggcaggggcatgtgaatttctggggagggactggcaagcttgtttgctgtctgggagatcaaagctaagaggccctttctgcaaaccttgcaaacgtgagggcttcacgtgattgcaggactgacctcgtcctgaggttactggtgaccgggagagagagaagccggggagggagatttccctggagtcaggagcttaggctgccctctgcttcagggcaaagtccagagaaggaaaggaaatgtgaccccctttcccttctactcgccttagggagaacacctccaggggaaggagttcccacagaggtagggatgtctgtagggactccctgtttgcttgtatgacaccattccacccactccagttgactttggggtgagtcatttccctttgtctgggaaataaaaaggacaacagaggggaactaatagtgaaagtgctttgaggtcctaaagtaatggggaagaggtgaggcagggggtgggggcagagtgacacccctgcccctcggtgctggaggataaaatatgaattccacagaagattactactcagaggggaacatgtagatcatcttaagcctccctctttttactagtggggaacaggaagcttaggagaagtgaccgacccaaggtcagacgtccattgctagtttcatctgcccaccccgaatgggaaggtgggtagatgtacaagtgaaatactgaacaggggttagaaacagccagcattgccgggtgctttggctcatgcctgtaatcccagcactttgtgaggctgaggtgggttgatcacctgaggtcaggagtttgagaccagcctgaccaacacggtgaaaccacgtctctactaaaaatacaaaaattagccggatgtggtggtgggtgcctgtaatcccagctagtcaggaggctgaggcaggagaatcgctagaacccgggaggtggaggttgcagtgagccgagatcgccattgcactccggcctgggggatagagtgagactctgtctccaaaacaaacaaacaaaaaacagccagtatttcgcttcagagcagcaactgtcccatgagtaataacagatctcaagtagaggagatctatcatgttagagggcttgggtcatggaggggatggaagcttcttaggcagcgaagggagagggagcctgagccacctgctgctcccgctaattcctccccagtcccagtgcttctagagagggttttcttcacataggaagcccttctccacaggcagctcctgggatggtattgat

SEQ ID NO: 404 - DNA, 25798 bp, Homo sapiens
  source 1..25798: mol_type = genomic DNA
acaagcggctgtacaagttggctgtcaaaaaacgctgatttctcctcctgtcacctaataaacccctacgcgcttatggcctcgtcccacaatcccccaatctcgtcccaattcgaaaaaccgaggaggagggaataaactgagagataaagatccccccatcttgctctttccccgggaccccagccttggtcgcggcgccccactaaggaggacacaggctctggtgtgtgtggtgtgcgagaccccgagctcgaggccgagccaaggctgggcagaaagttgcaatcacgtgctgtcggagcccactggagcgcacagcccgctccccctgggacgcccaggcggaggacctgctgcgccctcccagggctcgggggactccagcattcacttgcacgcacaggcgaactctgattgaaagcccgggatgacaccgagtctggagaaagagggaccggggggtgggctggcggaattgcagagcgccggccacagctcccctccccgcgaacgtcgagcggagggcgggaggtgtaacctctgacctctggccgggtccacgccctgaggagggactggcaagctcttgttcgacaagttcaagctgccgagagagcttaaatagaattaatctcttagagatcggggatcatcgctccctcggcatgcgctctcccagcgccgcgcacagagcaaggcgcgagagagctcaggaatcgcgggaaggcaagcggaatggggagggggtaggggatgagggcctctcttcactattcctccgcccggagagcgggagcccgcaacgcccgccgaggacgagcggcgggagggaacgctctgccctccagccgccccggtgcagataatggaggcgacaagagattcgctcagcgtcggatgggccagctctgcttggggaagctggcggcatcctcccctcggctggtgcccaaacccactgcgcgaaggccgaaggaacgcggaacctccagaagaccccatcctcagccctgactttccgtagatatgtgcaaaatgagtaaattactcacctcgggccagatccaagttttacccaacagaaggggcaccggaccaagaatgaaccaactcacatggccatgtccggcgcgcacaatcacacgccagcacacagccacccaatttcttccgcgaatctatctggcactctggagagagggggaaaagcgttttgagaaagccccgtcacccctccccttccttcttgccgtgaaatatacgaattcatttttattacgagccgcaccgtcctcaccatcacgcacgcacagagccacactcccatattcacactttctaactcgtaagctccgacagcgcctgcattttctttgggagccgcttggaggttcattaatatcattagcatttaaccccctccctcttcccatcccctccccgcacatggctgacgtcagaccccgccaggagttgggggaaaagctaagtgggccagggacgccctattcccctccccgcggctgcctgtcagagcgcttctggagatattacaggggacccagcccgcagcgacaggcacaaagtcacggggtaatgaacttcggggacccttcgccgctgcgtgcgcggctctccccggaaacccggacctggccgcctcttccctcggaagatttcccagcaatctagttttcccactctgcgcttgggttccggcagcgcggagcccgtctgcctctgagactgcggtagtgttttccttctttccttgggagaccagcggtcggcagagattgcccacactctgcatgcctatgtagagggagagatcgaagactgagtgacaggaatggggaaaaagagggatttcgctccgtaggaaggccattttcgtgtctccatctctgtctttcaacatccctctcttgctgttcttccttcttcctcagtcttcctgtccatctctccatctgtctgtccatgtgtgtgtccatatcaagcagcattcccagcagctgcggttttgcaagagccgggaagaaacttaaggatgcttaaatttccactgttggacgaattctgagcgcccagggagcagcgcagcgcgcgactgacacccacctgtcccgcccaggagccttgcaggctggagggcagctggagagcggcggcgcccggcggcgaggcgggcgctgccggccgggactcgggcagcgcccaccaaccgctccgccccgggacagccagcatgagcaagccagccggatcaacaagtgggtacctctcgggccgccgtggggcctaggcgcgcagcctggggcgagcgagcggggaggctgggggaggtcctgcctggagcgctgcgaatctgagcccctgagagggattccagcgggcgtgtgcgttcggcccagacctgtagaccgtgagttggagcatttcgtggagaggggagagccgtttcgttgcctctggattgcttgatcccccctgtctggtgcggtgagaaggttacgacccgcgcagcccaccagtcggatgagttgtctccatttagccgccaggtgctggatgggggggccatgggggcgggaactgggccgcagctccaggcggtagcacaataacacactcgctcaaaactccgagctccagcgcgcaaaagcaactctgtgcaaagcggattttgaatggaatgctttgcaccccgtttctagctatttcaaataatcctgcaaactgggaagcagaaacaatttaaaagtcacattttccttaatcctaaatccgcgtaggtcataactggggaatttaaagtatggcgaaccactctagcaaagagaggaccaaatccctaatcccaaggacttttcgagccggagcccagcagaggcaggagtgcgcggcctgctccctccgtgcgcttctctccttcctcgaacttccttagctgccggctctccgaacgccaggccgcagctgacctctcaccaccccgagactcacgagcgcagggctaagtgtgtgtgcgagggcatttgcttgcaccctgcctgcggaacccaagaatgtgcaggcccgagccagcgttgagcaggcgcggtcacggtgctcagatctcccgggggcatttcagttcccgccatccagtggcccacggctgcgggctccagggtctgaggctggggactaccgttgccgccgcagtccccatatcccgaagttgccttgctgcttgtgttgttttcgcagatagcatttttggcgctctgtgcgttccttccctccccctccccctttcactcgccctcattgtcctgagtctttgaaagttgggagaatcggagatacttctgaggactggtaatgaagtctcacttaagtgggatgcaattcccgccctcctacccccctccaagaaggaggttgtgttttcattttgttttgctttgggtgctgacctttaaaaaattagagcaaaatgaacgtgaacaaaaagaaaaggagaaatgtttcgagctggggcagagggagcagagaaggagccctcaccgcggccggaatgcagagcggaccctggcccaggactgggtttccctttaggctcgggcctaccctggccctcgctgttggaatctccaggaggtaaagcgacctcgatttttgttgcccgcattcccgggcgtgagtgtccttcccaggaggctcaggaggccgtttctgttgcattctgagcctccgttgcaaaaactgaagcccgtgggtctcggcaggcctcctagctcgctcgccccgggacaggccctcgcctacacccctggaagtaaggagccccgggctctttcgtccttttcggggtgtggagcccctggggcccttgaaaggtgaggcctcagaggcgagggaggggtgagcggggagctctgcccgcctgcggctgcgcccccgctgtggactaggaggcaggccaaccctccggactttgggggaaaaaccacagcgggctccttgcggaaactttggccgttctaacttgccaagagcctgagtgaggccttggaagcctccagccccggctcaggtcgggacgcggctgctgagctttctcaggcccgcaggacagcggcccccgccggtggcgccgctgcatttaggccctttccagaccggtggcggcagccaacccgagacttgcgtccctcgggcccggggcagctaggaggtcggcgcgcagcgggccgggtcaggactgggtcgagcagacagagctgcagcccccgccttgcccggcttctcgcggctggagagcagagcgatgtcacccggagccccgcctgggtggtaacgagaccctggccagtcacccctgcagcccagactaacttctttcaacagcctctgatggtaattacagtaatcgaagctgccatatatctttaggcaattatgacacacaaaaagccccgaggggaccccctggcgagggaagttaagaacggttttccagcttcaggaaactccggctcgcctcacgtcggagctcgctcggcttgctaaatgagaggagctttgcaacggggtcaaccagcttgtctcgtgaccccaagtcaccttaacgtggctgggtggcggagtctgaggcacaggcccgctatgccccggaattttcgcgtccctccctcctgggccccgccccagcccggttgcctgtttctaatctgccccgggagccgcggctcagaggtctgctcagaggcaggactcgcactggtggtggcctagagggcaacagtccggaagctcgggcgggggaatccgaggaggggcccccaccctgcactggtcttccctccaccctcatcgggttctccagagatgttgtcatgggcctcctgtccggatgggaagtggggaaaaagagaccccaccactgctcctcccactcactcatcttggcatcttcaacagtgccacagggaagaggacagctggggtgacagtactgctgggccccaaacgtggaccctggagcggtcagagggcgcgtgttaagcagaggatggttgtaagatatggaaaccaagtttaccgcttccagagtgagtgcagtgcagcggagctccagacccggttcctgagcgaccaggaactcccttgggcgcagtgacaggcccgaaggagtggaggacaagacccgctgtgcccttgcctggccctctccagcccctccctcccacagcacaatctcccctcccgccctgtgggaggggggcgccgagccggtggccgccgcgccgcgcgcctcccctgcccgcctttgtcgccgtccgaattcccatgctactctttttgacgggtcactggtggctctataggcaggtgctgccgcggggttgtaattacccggccgagcctggtcgttaccgaacaccccctcacccccaagcacggtcccccgcgctctccttcccccaccccctccacctgagacgagtctgggacccacggtgcaagctcgcccggacgcctcgggttccaggagcaagtttacacctgcggtgcctcgaggccctccccgcgccacgccctcacctcccctactcccctcgcccagacgttccactgccgccccttcccacctcaatcccatcgtagtccccaacccaagcgctttcggcagcagctgtcgaatttcagggaggcctgaggccgctggggcccaaactggaggccttcggataggtagaagaagagaaaagcaagtgttaataagtcaattgttatcaactattgttatttttaaaattaaagtgttaattaagttaacagtttaatactccctttgttttgcgggaggaagcatttctaagtccctataaaccgcttcaggcacttgttggactcttgaaccttagaggaaaagaatccctccctttctaaacggccaaatattaccctctccctgacactcctccagggtcggtggccaccccaggcttgaggggattccagggaaagttctcttgaggtggggtccatggggggtggggggatacagcctagagaaatcagtcagattcttaatttaaaaaaaaatcaggctcaaagagcactggaaaaaaccgggaggaagagatccacacaggaccaagtgtgtggaggccagtcttctagggagaaagggcttaggaaatggagggagcctgtcccaagctaacccgacagggaaccgacaacttgcgtcgctcccctctcccttgcctagtcccgaaccactttgcggagaaaataattttttcctaaaagaaataatttctctaaagcgactcaccaagcattttttaaataggtaaagcgaaagttggccaattaccactacccttattatcattaataatccaagtattagcattacaataataatcctaataataacaccgcccggcggagctcagagaaaactcgattgccttccagctgccatccctggttccagccgtgtttgtttttcttcttttcccttttacatttcaagtttgtctcctcgcgcgctcactaacaactttctctgttaaatgcaaaagcgaaggagggaggcggccaaactttccgcggagcagaaaggcagtggagggccgcactgccgcccgggcctgctgtcatcttttattccaaaatgggtctcggcgattagaagagaaccaaatacatgtagcggtgcatgaataatgctcattgtaggaaactgacacttgctcaaggaaaaaaagtttgggtataaaatcacttcattatttgcttttaccgcagcttcggtgctaatcccttcagaggtcagattgcttagcatctctctctccctctccccttttctccctcttctccgccctcctttccctctcgccccttccccccttccccgtctttcctgcgatttcaggccgcattttagatatcccctgcaaagtgtgtggcgaccgcagctcggggaagcactacggggtctacgcctgcgacggctgctcaggttttttcaaacggagcatccgaaggaataggacctatgtctgcaaatctggaaaccaggtaccttagccagggctgcactgctgggctccgctctgctgcctcctcactcttttgtttgtgccaaggcctcctctgagtttccacgcagttgaggagagacccggccctgacctctcccttcctctcccctccttcttgcctcaactcttggaggccctttggctggggaaaggcgggaagaggtaagggaagatatgagtttacaggagggagtctgaagtcctagagcctccctacacttttttaaattattattattctgaaagattttgacactgggtaaggcccacaccctgtggctctaaagccggcccaagggacctaaagaatttagcatctaaaccacaagtagcaagcaggagaaagagctttgttattgtgcctgcccaccccacactcactcctagcagcatcaagctcagtcccctgatcacttgcctgggatgcagaagtaagcggcacacagacatctgagtcaaggtcaccaccacctttagctgagaccaccaagtgagtgctagccacttggaagagaggccgtgctttctgaagggttgtgcattttcaactctggagaagcagggctgctctggaagtgggcagtgggaatccagcacccatgtgaccttagctatgccttgtcagaaaagggcagggtgaggaagaagagaagattcaaaaggaaggtgcaactgggaccctcctcaagcttccatatccctgtcctccttctctgcttagaatttgggcccagtcggttgttttggtcttgagtaggcagaactgtctcaaagagacagaggaatctggcatgggctgaatatgagccaaagcttctagaaagagtgagcagaacctcttgactcagtttccagctcaataataggctgattttaactaaggagatcaaccttctggtcctacactttgccctctccttatcagcgactcagaccctcagtacagagtcctccatttcacttgtggaaagatccctgagggtgcattagtcagcagtcatcctttggtaacaaaatagtaaaacacttttcactaattgatatatatagggtacatgtatacacatgcatatattgtctgctgctagtgaattgttctgacatctttttctgaagtcatgtctgctcatattgttttctaatagttttggattaaccacaaaaacagaagatatttgcattgagataaattttgagctctctagccctgttacctgtttaattggctactgtatcagtttctagcttcaccatatggacacatcacattttacacgcataggactgtatcccaataactccacaggattgtgcgattactgcgggttgtcagatttgaaccaacttctacttagattgtcttttgcttttatgcagtgaacagaattggaaaatcaagatctctgatgttgtgcttgatcttttagaaggggatggctatcaattcaagcatattgatatcagtccaagtgcttgtaaaggactgataatagactcatcaggcctggtgttcttcttgcaaggagagtaaatgatcagagctgaggcgtttatccttctctctggcgctagatatttatatacatttgatctgatttgaagacacacttaagaacttatgaaggtttccattttgcatttgcatacttataagaatactggaaagataccatctgaggatagatatataattacatttaataacaagttttaaaaaacctgtttacaatgaactattacattggccagcaaagatgccctaaataattcactttggacccaaaaattatctcctttctctcttattctaggattaaattatattccaatttattattaacagtaatgaggacatttagaaatggatatgaacatctgtcccacctttattttaaataaatcatcataatttaaattggagaagtgtgaactcataaaactgcattcgaatgtgtaattttcccctaaagggcttcagggggaagaaaaacatacttactccaactccagagtatatgaatttttgagattatgaagcaaaataaaaatacatttattatctttcttctcactacaaatctaacagtagcaacttctataaatataggagagcacacaatgtcttaaatattttctgtgtataaaactcatgcacatgactctttatgtatctatgcatatgtcccctcggtaatgacatctaacactgaataaattccaaaggaaactttatctgtagatttcctctttcaatggctaatgtttttacagaaaattgcattaggtaaacatctaatttctcatgcatctcagataaatatttctaaagaagtgactacctttattttttcagttactatgctaacagtctgagcccatattatcatttagtctgacagtccatcacattaccttcctggtcctgtttacatggtgagcatttctatattttgctcaagacttgagctcttcctttttcaccctcatcttctctaggccttgccctcctaaactctcaccttccaggaagggctgtgtttctatgcacctgggccgaggctagtctttaaggcaactctcaacttgctgataataaggttggcttcatacaaaagcaaaagtgaggtaataggagagtgaagaataaatgggagagatttatctgatagataaacgggctctcccagaaagtggcagaaagaggtagactcaagtactgaaagcagaaagaatcgttggtgggagggcggtatggtgtgaatcctgacccaaaagccagctcttaacggaaggaacttagtggcctctttctctggggccaagtcgctgtcttcggtcctgaagtctcgtccctgttccaccactccgcgactggcggaagttcccctagcgagagccccgcaggcctgcggggtctgccaaacccggctctctaagcttcacctgcttggagaaggacgtttcccccttgtccgctttcttggggtccgggactggccctcttgaagtagcctgggacgtcccagccccttctcgatctggccctgctcatgcccaaggccctcgcgttttgcaggcccaggctcggggctccagggcctgcggccgggcaaggtcgcgcctccacaccgtttccccgcccgggtgccggctccgggtctccagcctaaaggccctggggaccgctgacctcctgctctctgttccagggaggctgtccggtggacaagacgcacagaaaccagtgcagggcgtgtcggctgaagaagtgtttggaagtcaacatgaacaaagacggtaatcagtgcatccctttattccaatgttgattgagtagtaagtaaattatatgtacagaaaatacatggcactcctatgcatgtaaatcaaccccggagcgcttctttccagatgctgggaattggcctcgggctttcagtcgtatccttcccgtctttcagcaggagccgctggcgacccctagaattccccagggcaagacccatgcccacatcaggaacttgcgccccacagtcatctccacacaggcagcgcttggggggaccccactctccaggggaccggcgcgcattttctgcctccggtcctaatccctctttgcagcccttcgtggccacccttaagcctgctagcctgccccaggatcttaaaatctggatagtctcacggggaggagatcatacaggctggaagttcgcggtgtgttgaaaaagggagggcagagacgcgaaaacgcggaatttccagcccgtgtgcaaattctccaagatgccaaaatcagtacggccattgggccgatgtgagtccagggccttctctctgttctacagaaaagagggaaagggggctggagaggcagggtaacgcccgtgggtgcctcggacacccagctctcccaaggctcttaagcgcgcaacagcaagaaccaggacgtcagagtgcttcctgggcctggagcacggtccgagctgcgtcccccgctgcagcctgtcgagggcgccccaggcccaggcagggggcgagggtaatgggctggaggacaccgtggggcctgggaacagggtgcgagtgggttttgctgtgaggcggcccgggccgggtggcagctccaggaggagagagagccccttcctctgcggcgcaggaagccggagggagcgtccaacctgttgaacttgtgtattgacaagttgtcaagctcggcaggccgaagattgccctgaattaatttgtttgtttaaactgttggtggtaattgtcacatctcccctgcctttctccagcatactcggagacgggttctccctcgttccattccctagcaatcccggggctcgggtcctttcctcctgcggccctcggaggccaaaagctatttctgtgggggcggggcctgcgggtagggaggcttgttcttggacggagctggaaaagtctgcgcagaaacgaggtgtctggcgtgcgcgacgctccctctcttttggatgggggcgaggatacctggctactccagcccagagggtctctggtttccctgcgaacccccttccctggtggggaggagccctggaccgaaggagaacacacctggtcttacttgaggctctgccattatcgtggcactttgagcacgggcccctcttctaagcctcagcttccgaatctattcagtgtagtggttagacgatctcagaatcccttcctccctcagattccctctcccttcttcttttcacctcttgggcgattttgcccgcccagacttgacattggggcggggctggggggagagccgcagcggctgtgtctcgacgtctctaatcgccggcatgcgtttctctgtttgcctctgcagccgtgcagcacgagcgggggcctcggacgtccaccatccgcaagcaagtggccctctacttccgtggacacaaggaggagaacggggccgccgcgcactttccctcggcggcgctccctgcgccggccttcttcaccgcggtcacgcagctggagccgcacggcctggagctggccgcggtgtccaccactccagagcggcagaccctcgtgagcctggctcagcccacgcccaaggtcagcggccttgctgggcccaaagagactcgtgccagcgaatggagagggacgcacccagttcttctgagctgtgtgattggggtcaggcaaactggggagagaactccagggtgcttggcgggtctctgcatggagctccagcccttctgctctcccttgttcagccaggggtgctcaaacttgagtgtacagtagagtcaacctccgagtggctacaagtgtgcactccggatcttatccccccagaaatttcatttcagcaagtttggggtggaggccaggaacctgcacctttaggaaacacccactggtaatgggtggtgggtggagacctcgtctaaacccagagggcagcctcaggtgttcctaaagaccagaagaaccaacgttcatttttagaggagaggaattggctacagctggaggaagggctccagaattccaaatcttggcatgtatgatcttgggcaaagccatgagtttctaacgcaagtgcgaaatgtggagatcacactgttagaacagtttgaggaatctgagttcatttcccatgctcccctcacctacttctgaggcaggtggatttacagcagggttgattccataggagcagggccacagcctgaaccacctggaaaggctgccacctaaggcctaccctccaggcctacagctgatacctactaacacccccactccaggctgatgagggcctaggatctccctcagaggagggccagctgcagccccacactgcagggaagccagacacctgggcacatgcacacgcacaatatttaatatggctttcttacccttgatgtgtataataagctctggaaagtagtgttatgaatatgttgtcagttatgaatgggaatgctctgtgaatgattaagatgtctaattgaaatatttccataatatactaatcctttctaaaaatactcatatgcatatttgtgtttgggatgcctattaatttatactttttcacatctatttttatttacacaaatgcaagcagctcttgtctaaattgggagccaggcttggcacttggctcagcccaaggaaaatttgctgcaggggatagaaaagccagagggccttctggaagggagaggctcccaaagagtggaaatggacctcccccaaccagtattacttttcaaactctatagacagcgatgtttgatttttttacccaccaatgtcaactgcatgtttaaacaaaacatccaaattcttttttatccccttccttgctttaattagaaattaaaagtttggttcttcttgcaaagctgtggtttcctcacttccaggtgtctttctttcttccctacccagtacccccatgaagtgaatgggaccccaatgtatctctatgaagtggccacggagtcggtgtgtgaatcagctgccagacttctcttcatgagcatcaagtgggctaagagtgtgccagccttctccacgctgtctttgcaagaccaggtatgaccacactgaggccttgggagaaagagagctgggaaagaagcagtagcactcagccttataaaacttcctctatccctgggtaaaccacccaaggcaggcatccattcttaatagcagtgaggaaactacttgtttttacttgcttcttcctgtgggttcaaaatatctacctatatgatccttagtaagaaacgtaattacattatttcagaaaggatgggtccagtctgtgaaaacacacatacaagaacattacctctttttgtttgattggaacagcaaatataatctcaaattttaaaattgtaatgattttctaaaactgttgatgaaacaatgttttactaagaacattggaactgagagaagtagaaggtggtaagagtatgccctcatgagatttttcagaactgatgttattattttatattcccagctttatattctccattgcgatgctcccagttttggtcattaattgataagcatgtaaaaccaaagggcacagtgcacacctcctgtaggctaggttcttccttgattcttcatgtacttttagacattttgtaaacaaataggcattttgcttaattccgtggttgtaaatgacattcaggggaagaaaaagtgtgtgcagtgaaacattgtattgtactgagacccagaaattttgttgataggaatattagaaatgctaacatttttctaaccttaaaggaaagaaagaaaataaagtgttcccaaccattggctgttaccagtgcattcacaggaattaatgacaaattttccaaaggctaataagtagttctaaaagcaaaggatttatttcttcaattcatttcatacctaattaaagcataatagtgcccctttatatgaagtatgtttcctacggaaagatcgggcaatgtgctaaaagcatttcattttctagcatgagatgttcttgttttcatggcctgccctttcaaatatggccagaattaaatattgtttaccttgcattttataattatttcctgtacttgatggaataaaactaaaaataaaacattaaaaaaattaaaccctttggtctaattgtgattttggttacaagccttcatgattcagctcttagctcccaaaagaaatccttttacataaatcatttagagttgactggcttttgagttttgagatttttaaaggtagttaggtcctatctttgaccaggtttactggttagctctaaccacttcctgtgtgtgtgtgtgtgtgtgtgtgtgtgtgtgtgtgtgtgtagactggctattttttttcaaaataagtatttgtatactctcacccaaacaaaatttacttactgtctgccacttagccctttggtagaaatccttcgacaacaagcaacctgcagtgaagtggaatctggtatattaatttggaaaaagagacagattttcattttaaatattcagtagcacattttattagaataaaaatgacaagcaccttgatgctgtccatttatgggtctcagaaaaatcaagcagtgagacgaggaaaactcagcaaaacccgattaacataattacaccctgatttcccccagtgcctcttgggaattagtgatctctgtctctctcccagcccagccccctcaaccctccaggaagatggggacccagctctgcaagcgtctgaggaatcctcaaccctgctaatagcagcattctctgtgaggggaatccacctgctgagctgctggcatttcataaagcctcgctctctagaggagcttctaggtggtcaggaatgggtggatacaaggacaagaggggcaaatccttttctgagagaaggaaactttggagaattggaatggctgactctcaaatccatatgcatatctataggcaccttttcaaaaggaaaatatgggaaaataagggaaagctagaatattcagaaaaaattaccaagacaggcatttaaaacactttttaaaataatggaaatttacatagtgaaattgtttataaatttataaattacacactatattatattatacatctattgtatgacagctgatgcttttggaagatgcttggagagaactgtttgttctaggaatagcacaatgggccattccggttgatgctaacactctactggctgtatctggtaagaattgcacaatttaatgactttgttgtagaaattaccataaaaatacattactgaaaaaagaacaacatgtaaagaataacaaattcctgctgaacaatagagtatacctgtcatttataaatctatatttaaatgcaaataatgttgttttgttgtattcatgactgcttgcattgttatttaaatgcaaattactgtgtttgttatcatccaagagaagattttatattaactttcatacaatatagccggtttacatggaatcagatatcttagagtgacaattgaatagatattgatatgcaggattttgtcaaaaatcaatattaaatcatgaaaatgccttcatattagagtatttatcccatatttttattctaggcatgaacggtgacaacacagattcccagaagctgaacaagatcatatctgaaatacaggctttacaagaggtggtggctcgatttagacaactccggttagatgctactgaatttgcctgtctaaaatgcatcgtcactttcaaagccggtaagcagacacagacccctgtttcttctccttccccagttttgccacctcactaattcagccacctcgaagtctgaactgacctttgcaaaaagaggtgatggttttcaagggagctgatactcttaatctggccccattttttattgctatgggaacctgcatgttctgctgggcatcaacttccagagaggtgcattcccagacccaatttctttttttctttctttttttttattttttaaatttttgtggagatggtgtcttgctcttgtcacccaggctggagtccaatggcaccatctcagctcactgcaacctctgcctcctgggtttaagcaattctcctgcctcagcctcccaagtagctgggattacagacacatgccaccatgcctggctaatttttgtatttttagtagaaacagggtttcaccatgttggccaggttggtctcgaactgctgacctcaagtgatccgcctgcctcggcctcccaaagtgctgggattacaggcgtgagcactgcgctcggctcccagatgcaatttctatgctgtctatcacagtttcctggtcttcatttctagttcctacacatagtggttctgaactgagaagtttccggaatgctgccgccattgcagcccttcaagatgaggctcagctaacgctcaacagctacatccataccaggtgacccttgtttgccttgaacatgtacttaagaaaattgcctccattgtgaatgcctgagcaggcggtaataagccagttcaaacattgtgactaattatcttgttgccagccagttaatttagggagaatccatgtccttacctatctctcagggtgggtgagaggagcaaatctaattagatgatcaaagtgaaagcactgccagacatattacagttgtcctggcggaacaaattgatccatcaaaataatggaacaacatttgtgtgaatgggtatggaggggtcaaaaatgaagcctaggctgggcacagtggctcacgcctgtaatcccagcactttgggaggccgaggtgggtggatcacgaggtcagaagatcgagaccatcctggctaacacagtgaaaccccgtctctactaaataatacaaaaaaattagctgggtgtggtggtgggcacctgtagtcccagcagctactcggaaggctgaggcaggagaatgtcgtgaacctgggaggtggaacttgcagtgagccgatattgtgccactgcactccagcctgggcgacagagcgagactccgtctcaaaaaaaaaaaaaaaaaaaaagaagctcaaagtgtaatggttggtatgtgagagagtggccacatcatccttgagaaaacacaggtgactttcttcagatgccaatctcaaataaaaggatgagagaactttccagagaggctatctttttttttgagacagggtcttgctctgttgcccaggctggaaggctgaagtgcagtggcatgtgagcatggctcactgcagccttgaactcatgggctcatgtgatcctcccacctcagcctattgagtagctgagactataggtgcatgccaccacacccagctaatttttttttttttttttttttgagacagagtttcactctttcacccaggctggagtgtagcggtgcaatctcggctcactgcaaccttcgccttccgggttcaagtgattctcctgcctcagcctcccaagtagctgggattacaggtgcctgccaccacgcccagctaatttttgtattttcagtagagacggggtttcaccgtgttggccaggcaggtctcgaactcctgaacttgtgatctgcctgccttgacctcccaaagtgctgggattacaggtgtgagccaccatgcccggcacacccagctaatttttaaactttttatagagacaaggtcttgctatgttgcccaggctggtctcgaactcctggcctcaagtgatcctcccacctaagtctcccaaagtgctgggattacaggcctgggccactgtgcccagcctaaagaagccatcttttcacctatcataactgttgtttggccttggtgactggtatctgttattttgtgtcataacatctaccaggttacttctggccatgcagggcccacaggcagaggctgtttttggctgtttgtaggaactctcagagactggggctccaacaaagctcctcctggcccagcactgggcaagcccattaagaagtatagactgggggctgaggtggctccacacctgtaatcccagcattttgggaggccaaggcaggcagttcacttgagctcaagagttcgagaccagcctgggcacaacatggcaagaccccatctccaccaaaaatttaaaaaaaaaaaaaagaagaagtgtaaattttattatgccatttaaaaaaaaagccaggcttttaaagagaaatggaaactttctagtttcctgagttaggactggtagatttgaagttagaatagagttactcttctctaggctgatttgaaaggaatctgtgaaagctcagctccataatctcaacatcagctatagacactgtggggggaataaatacatcaaatgggtagaggctgttaatgcctccctcaactaatgggtcagagaaatcccaagtcaactctgtccatttggggtgataccacttctgctagagtctctctatttctatcgtaaacctcttttgaatactaaatgaataaaactgttccctgtctatggaatatcactgaaactatgttgacagatagtgcacctgtatatgttttttcaaattaaaatgccaggatttgaattttaaatgcatattgaattacagaatatatatagtaggcagttaatatttgttcaaatttattaaatggagcagtacataatctgggtacttctactgacttgtaggccgggcacagtggctcacacctgtaatcccaagcactttgggagttcaaggagggcggattacctgaggtcaggagttcaacaccagcctggccaacatggtgaaacccgtctctaccaaaaatagaaaagttagctgggcgtcatgacgtgcacctgtagtcccagctactcaggaggctgaggcaggagaactgcttgaagctgggaagtggaggttgcagtgagccgagattgtgccactgcactccagccccaggtaacagagtgagtgagactccgtctaaaaaacaaacaaaaaaattaaaaagacaaaaaaacaaaaacaaactaacttgtatgtcctaactgacctttgacatttagagccattatggtattaagaacttaaaaatgagaaggacgtggtatccagttattgatccagtcaagcctttgccgagtactggccacatgcagggctgcaggtgggcgatatgggataccagaaggagcaagacactgccccttatcattgcaagaagtgggcagcagtgtcactccaatccaaactagagaagagaggaaagcaatgtggggagtgtgacagatgaatcctagtcagagggagtgagggacaatcagaaaagctcaaagtctgatgggtggaggaaagaacatgtgaattggtccttcaatgggaggaggatttcagcaggggagaagatgtgtcctgagagtggtggaggagctggtaggggtcctgtgggaagtgccagagaggtgagtgaggaggggagcctggtgtgccaggagctgctgatagggtggcccgagagaattcaaccatgggttaacaacagcctattttagagaaatggcaagtaaagtacatctccccaacaccgcaaaagaagaaaattatgtgtggaaaaaacacatctgctttgccatggaattcttattatttctattaaatattagaatagtaaatatcaaataagtatcttatttcttattaaataatggaattatggaatttcttatttcatggaattcttatttcattctgatatcagctacagctgtaatttaatatttatatctagggtcatacatgtgacaaaaatgactatgccttatttcttagcccttcaaatcagtgaacactttttcctccagcactttcctgtctagaaaaataaaacctgaacttgaaatgaaaacttaacatgcaaactgaaactgagcctaattgtatattacagctctctaagctatttctctaattatcgaggacgtaaggagaaggctaggaattgacattccacacaaactatattctataactgaagatcaaatatgcaaatctgtaatagacctaaaacacttaaacctaaaagaaaatccaattattgatgctaatggatgaagacaagggcatagatattctaaaaaataattttgattagtcagaccttctctctctaacacacacacacacacacgcacacacacatacacacacacacacacacacacattgtttttgttttggatgcccaggctgcattgcagtggtgcaatcatggctcactgcaacctctgcctctgaggctcaagcaattctcccacctctgccttctgagtatctgggactacaggtgcccagcgaatttttgtagagatgagcccttgctatgttgcccaggctcatcttgaactcctgggctcaagcgatgctcttgcctcagcctcccaaagtgctgggattacaggtatgagccaccacacctgacctcatacattgctattgtttctggtagtagtacagtatgctatatgtaatagacaattaatttttgttgactgactaaccaaccctttcccaactaaagaataaaataagtgggagagtagatgagtgggtaatctaatcgcagaaaatcaggagttggttgtctatagattcccccaaattcatcctttctgaaggtgattatttctcacagtggtttctcaccacgggaaatgttcagcatgttgggtggatgctgcagatggcagaggtcgtccaggcagccactgcctccgacttgctgaagaattatctctactatgcctggtcctgggaagggaaatagagctgttgaaaagaagtggccaaggtgaaagggagacacggatttggggattactttccaagaaacattagaaatacattaaacaaggagaacaagtggtaggatttaagtatttttttttaatgcaggtaagcttcaccatttccacaccacactactagatgtggtctggtggcccctatctgcaggtggtcatgaagctgggcagtgaaagagccagctgaggtcctgagaggcccagatgaactataagccttgtattctgtggaagtgaaggactcttatgtgcccagagctaaatatttagacaagcatgaaagttgctcccctgaactttatttgcagggtggagttatcaggcagttaaacacagccacctgactccttcgaaggaattttgatatcccttagcttctagcaccttgtggcctgggttgaacccagcttagtcacagatgtgtatcccggaagttcaggttttaggtgtttcatttcagtggagggagctctccttatgtatattgatatctaattctaactattggctgaagaagtatcagggctgcagtgaggaggtggcttgcaggcatctaaaggcagcagaagattgaacttgcacatctgagcacagatatatgttggacatcaaaagaggaaattgttaagcaatttctcacatctttaattacatgccaatttcattgacatgagagttgggtggcactgccacccaacagaacttagtctttaatttgcagtgtaataaggatggaattattcctgagagagactaagtataatgcctgaataataatttggagaattgcttagaaaaagaagccattttatttgagggaaatagccttgaggagtccttagaattagaaaacatgggttctgttgctagccttatcctcaatgccctggtcgttttctataatggaaaccttaaatttattatttggcttaaaattagtattatgcttcttaaatttctttttttttcccaaacaaaatgcaatccatttgttaatgtagagagggtgtccgtgtgattttggcagcatcatttatggtctccctgcctcaagtagtctacctgcaaaacggggacaacagtgcctgtccagaactttgctgcagggatactgtgttattcaagagacctagatcagcaatgctggagatgatgtgtgttcaagtgtaagacgttagtttccataagtaatggcctctgaccttgttttcatggcttctcacattccagatatcccactcaaccctgtcgctttggaaaactcctgttgcttttgccagctttacgttctattagcccatcaactatagaagaagtgtttttcaaaaaaaccatcggcaatgtgccaattacaagactgctttcagatatgtacaaatccagtgatatctaagctcacaagatacccacttttcaggatgggacagtatcagatgaacttcaacccatggagaacaagcctcaactaacaaacccttcaggaagcatataccggggaatgtgtagccttcaggaaaaaaatgccaattgacacaaagcattccagtagctatgacctgccgccctgaccaggatagggcgggtgggaaggagaggggtgcaacaggaccgcctgcactgaaaactcactgctgccatgccctgggagggggcaaactgggggttgccacaggccgtgccattctgcctcttacctggaagatcaggctgaacgatcaaaagctgaaacataagtagtgctttctcttcctttttagcatacaaagtttggtaaccaaatatagctctgtgtataacatcgtactgcggccttcaaaactacgttatgttggagcatttattttaaaaataatggtaggttttaaattaaaagtgttatcaaaagtttcccctctattgtaatacattattaagtggccttcagaactgagttaataagtgaaaagtagcttatgccatgtgatttgctttttctctatcttcttttttcttttctttctctttcttttgttctttcttcttcttttttaataccataggccaggcaaccttgtcaaaggaattgatggacaaaatgagattctcaccaggacttcaggttggataacatgtcaaaaagagaagagctttactaaaagaacataagtcaagggaggatgaataaaaacagcaaaaccaaataaagtggagatgagtgattgagtgaggtagattgctgtcccgttaacatagtgctgaaaccaaaggcagtgggggtccaaactcgtggtgcagcaagtcacaccagacaggaaacgaatatggacgtaattgcagaaggaacttcaaggagatgaatgaatgctaaaagggttcttgactgatccattgctaacagcctgagactcttcaatgcctttccgaaaactggtttctagtaaagccttgaatgaacacacacacacacacacacacacacacacacacacacacacacacacaccgtcctacactttaagctgctcctttggtatgactctatacttatggaaatgtagaaacaaacatttttaaatagctgctgtacttttcacattttgatttattaggtactagcactgaggaaaaaaaattcagcacttggactatcataggatgagtaaaacttttcttgtacaaagtgaattaactgatttgtgaagttaaaaggttgtactcattgtatttacaaagaataaaaatatattgaatttaaatgaactctttctgatttcttaccctccctccctggctggttctcacccaccagaaacaaggtaggggcagcagctggtgttaaaactgaagctcggagcactccagcacagagcctgcagaactgaactacaaaggcaatttccttcttacagtgaataccatttggaaaatgatgaataaagaaataaaacgtaagattctgttctctacagctctcaaatgtaattgcatctgttagaaaaattgctgtgtgaggaggaaggaggccgattaacagagtcttcattccttcctctgtttctaactctcttgccaacatttcaatcctgaccagtcacttgaaatcatttaatgatcaaaaagataaagtatgataaagttcatatggtgagtaagatgtggagggagcagtagaaatgtcatccagatgttcccagcaagtcttaaggcaccggtcccacaagcaaaggccatcagaggtgcccaaggccacaggcactgtagactccttttgggtggcagctccagcaagagatgcttgtgcctctgctcttgctaaaatggtcttgcggaccgtatatgtgaaatttcaatcagctgtgcacttcttgtctacttattctacggagaatgagaattggtcttaaagaaaagcacagtactcaaagactgtgtaagaatgtcccttgcaacactgttcgtatttaacaactttagtatccattgacagataataggtacattgtggtgaatacagacaatgttaccgtaggcaaagtgaatggctagagctaatgtatcaacatgggtaaatctgaaatacagtgtgtttgtgtgtgttatggggaaagtaaattgcagagggcacatacagcttggtatcatttatataaagttttacaacctacagaacaatactagacaatgtttatgggcatataaatgtataggaaacatttaaaacaggcatgagtattataaacactaactgctggatagtggctacttccaagaagagatgggatgggtgaagggtataacaggaccctcaaatgtttctgtaatggttaatttcataagaaaaaaatctcaaacaaatatgagatgaatgacaagatttagtaaagctgagtgatgggtccaaggctgttcatctgtgtatcagtcaagttttccttcaataatactgaataacaaacatccctcaaagcttacagcaacaaactcttataacttgctcacaggactgccagcctcatgtggctgtgcagggcttggctgggctcagctggagctgactccaggctatagtttgggtttaatatgctccagggagtctgggggaggtgactcacacctataatcccagcactttgggaggctgagacaggcagatcacaagcccaggagttcgagactagcctgtgcaacaaggtggaacccagtctctactaaaaatacaaaaaattagccaggtgtcgtcatgtgcacctgtggtcctag

SEQ ID NO: 405 - DNA, 174938 bp, Homo sapiens
  source 1..174938: mol_type = genomic DNA
aagtcatgactttttttttaagactttgatttttttaaaaagtaggttccttgtgttagactaccccagaatagcctgtttgttgtatttacttaggataactactgtcttacggctaaaggaaaaaggcatgaagtgctttaattggtcatttgtggcttaattccatttatgtttgaccagaaagcacagcagaggaaaggcactagttaccaccttaatacttaaaggggtggtcaaaaccagggcatttaggaggatgttgtggagaaggattctcactgtaaatttccacaaagtaaacagcccttgatggaaagaaatatgataactcattaataagcatatgtcaagcacagagaaaatagtctttttaccagaccaagctaaatgaattagatccaaaaaatgttttggtaaacgaaaaaattaaggaaaagcaaatcactaccattcagctcaacaaacagccttccacggcccacaacctacctcactcctaacctctcccttatacacacacacacacacacacacacacacacacacacgctgggaaaagcagcagtaacagggagcagtttgaatgctatttgtggcatcttaacacaatacatagcccacaccccaaatgtgcaagcaggattctctcccgctctgtgcagaatatgcattctgagcctattatgtgtataaacaatggcatatgtaattacctttctagggtggcaattattcctcagaatcaacaaccagagttaaagcatgttcccccaaaagacatttggggatcaattctgggtcaattgcgtcaggctttgatttatcacatggtgtcaggccatgttaaaaaaagtaagttaaaaaaaaaaactgtatgaggtaaaggccaatggtttgactcaaattggtttgtttccaactttgctttctcccaattgctctgcccttcctccattctcaaaacaactgtgatttgctgggttttagctgttagacagtttgctgttcaggaatattaaatgcagtaaatctggactatgtccagattcaatctaccctacacacacacacatacatacacacaccaggcatggggactttctcctaggatatggcacagagtaggggtgaatagttcaggctttggagttcaagaggtctggatttggagtcccacaacttaagcaagatagcatacctccacagtgcatagtgcctacttcaaatggttattgtgaggtttaaaggagatagttgagagaatatgtgtaaagtatctcactgcctgacacaccgtgagtaccctgtgaatagagaaattactattctattgacagatggggcagcacatgacaagtggagcagcccctctgaaagccctgtccatgcatacagagtgcggcagggcccagggcagcagagtggatgttggtacaaataacggctgaactggcaaatccaagacaccaagtaagaggcccaggggactagactgtataaaaatatccagtttatttggatacgttccaagtagattgattgtaagctaccaacccctaagtagcaccaataaaggtgctattccattagcaagactacactaggcaccaggaatgcacagatggacactccaagaaatcttccagaacaggaaataaatatctacagtttagtagaacacaagttaataactaatacttcctggaagatacctcatgcaaactaaaagtggcataacaaatatccagtatcacgaccaggagtttgggagtggggcgattcagcctgttacagacaaatcatatcactaaagttaccagtccaattagagctattccttactgaggagcaaataatatttttttagaaattaagttaaaagggatcatatgagaattcacatcacattatttatggagcaatataatgcctcattcaaagaacactttaaatccagtttatacagagcaacattgtttatttaataagatggaaatagcacttacacaatgcatttctcagacagcacacagtgctattggcagtatgtattggcagcttaattaagaagtctgttgatgatgttaaaaaaaagctgacacattttcaattcagatggacactcctcaagacaaagacatgtctattgttggctcatacatactaaaatgtgtcatagacactacataaaatgtctggtatctacagttatatcagtgtctttacactgggaaaatcatgacacacttattctcaagtcagaaataaatttttggaaaaattagacagtcatttaacttatggaacacgaaggacaatgaatacaatgaatactgaaataattacttagccaaattttcatagagccgttgcccagatggattttgttccatccctatcctatcttgggtctctgagtaccatcacccacgtttgatccagatcttcctcttcttcatgctaataactcactcagaatggcaggcccctagggctggggtccacaggctgcagactagtacccgtctgtgggggtccatggcctattaggaaccaggccgcacagcaagaggtgagcagtgggccagtaagcattgccacctgagttctgcctcctgtcagatcagtggcagccttagattctcatagcagcgcaaaccctactgtgaactgtgcatgtgagggatctaggctgcgcactcgttatgagagcctaactaatgcctgatgatctgaggtggaacagttccatcccaaaaccatccccacaccatccacagaaaaattgtcttccaggaaactgatccctggtgccaagaaggttggggaccactgccctagggtgtggaaggtagtggactgtagagacaacaggtataattcaccttcccactccccaagaaatccacaagcaatatatttttccaacagacaatctatacctaaggggaaaaaaacagaatttaatgcaaattaactcaaactacaatgtattaatatgtctaaagtctactaaatatttatggaatcaataaaatggatcctatcagaagcccaacaacaaaaaaaaggattaaaatgtcctgagttgccatgttaggagtttttttggattttgttttgttttttattaaagagacttaaaacacagaatatacttttccattcatgtatttattgtcttggggatacacctaattaacagcagaagaaaaacaatgtaccctgaaactaactgtaaatttattgaagacaggctccacatctttgtctcccacatcttcttcccctattttgtgcagtggttcacatatagtaagtattcaattaagttgaaaagcaatgcaagtttcaattcacattaatttggaggggttgcactgatttaaggagcagctgagatgaaaaggctagcttcgatcttttctgatttctggctagtgaggcacaccatcttgaaaacttcctctgctgaaccttgcataactgctgtccactgcggcattcttaatgtcttgatttgtttccatttctgctgaaggtaacgagatggttctccagtgcttatctttccaaagagaaaacgtgcagggtgatttgaagcaggtactcagtggctatctgtcccagtcctagaggcagtgtatctgtgggcaaattgaaaccaattattaatccaggcctttctaagaacaacttttcagaagtacaaaggttagcttttactgatcactaaaatgttatttcgctcaacatttcaaaaatacaaccaggatctcttatggtggttgtctaaagctttatctccctactttaaataatgactttgaaatccatctcacccccaggcacagatccaagcctaaggaaatcagaaatatcacatacctgcatatttggaaaagaaagttcccctaccaggtaaggattctgcattttcattccttgtctttataagcaggaaaagccccactcgaggtcccaggccctacccctttgtgaatagtaaagtccctgcctgtgtcccatcctgtggcaccatatggatggctgggaaacaacagttgcagatagagaagcgtgctgtgaagcaatcggacaagcaaagaacattttcttcagcaaaggctctgaactagccaggtgggtcaaagacagaggcacacatgaaaacttcaaacatcagctaggtaggaaagcccccatgagggcagcatggaaggatccagtcacaccttgtgtattagttacaccatcatgcaccagaaaagacaggcatctttacaagaaacatttccattcattcacatgctcaggggctgttgtctctctgaactgtcttactgcagaccctggctccaccacccctccttgctcaggccctcttctcctcagcctggaataagatggcctcctagctaggcctaggtctcctctgccatagtctcaactccttccaagcaatgctaccacctctgggcctccacctcagccattcattccaggctccctctgagcttgggcccctgatgtctccacttaaaaggctcagcactactgtaaccttcaacccatcctcatcagagcagaccatagagaagcaacttcagcccagaagatggtgagactggaattctatatttgaccacaaatgcattcagttgcactgactttactctacattgcttcttcatttctccgttttcctagttccaaacatgttggctcaatcctcagagctggcatctgccctgactggattttcggtttcctacaaactggatttcggttgccttatgccttgccctgaacctaaatctacttgactagggacctgataaaacccttccctagattccattccaggcccccagctgtaggctgggatccagctgtgattagattgcctcctttcatgataccaccactcgtgactctaaatctcacctgttatctacaattctagtggcccaaacctcctgctaaattaaatctcctcaggtaccaacaccttccctgaaccaatcccaaccacatccacttggtcactaaggactggactgctggcttatgctagtgaaaccaagttcccagtccctaatacacctaatcttggcttcctcctgttccctggaaacctatgctgctgagacccttcataggaacttcctcacccagcctagacaaattatagcactatggtgtgtgtgtgtgtgtgtgtgtgtgtgtgtgtgtgtgtgtgtgtatgcaattagaatctaagtgtcttcttaataaaaacttactgatttttctacagtaaatgtctaaactacatcagaatagacatatatatgtatatatatgtatatatatatatgtgtgtgtatatatatatatatatgctgatctctagaaagaaaaggagaggaaagttccatcccatcttctccttacccctacccaagcccatcctcaaggaggaaaagacacaaagtgactgaatcaagttacccaactcagttaaactttttgtaagtgggagaagcttttagtgtactgggagaaaaagttaaagctttaacttctgtgggctctctcatctcttcagggttcatctctttaaggttctcactctctttggattgcttctttctacttccacatggccggtgtgataaaactggactgaaacttctctgagctgagctcatcagagactgcattaggtttggggtaggagggccagggcccaggtaggctaagaacgtatgtgcatgtattaaatatctgaggtgtagcctgtgctcatctcctccaagtacctgtggccacaagaaacacgtgggcaaggatctgaatgcaattagaatctaagtgtcttcttaaaaaaaacttactgatttttctacagtaaatgtctaaactacatcagaatagaccaagaattctgagaaattttgaagttctgggtcagtgttatttatgattcatgtattgagtacatccctcattcaaaaccttaattttatttttataaaggcatttctctaagaacacacttcttacatcatagatctctgagtctgagatctttttgagttaggatgcaagcaagacaaatcctggggggtttgtaagccttcctgccagattaaagccagggacttctactataaaatgtttcactggctcttgcagatgaccacagtccactgtagaatcatttaatattcatgatacttcacatattttgaatatttacatataacatatacatactacatacatatacacataaccttacttgaaaagaattggataatggatttaggcataccccaaagtcctatgatctttcatcacttggacaagtctgtggtgaaaactccactttgaaacaatgtttttgttagcatgtaactcagaatgacactgcccctaatacccactgtccacatctttttattgatagaatccttgaatttaaagagatgaatggccacaaaaactattttttcaggccctcctgatagctaggtatggttgatgggatgtgagtagaaactaggaatatatttgatttaaacccttagtactaatatatgttgctcagtcacttctgtggctaaggtgagaacatgcctgtagaagagaagtctgtgccttggtgagagtgcgtggccagcagtctccgatctgtgtaggtattaatgtgtcagggctgagtgttccaggatttctctagaggctggcaagggctcctgaaccaattgtcatttctgtcttgccactatatcagggttggagaagtccaagccttaggacccagtttcctttctacctggtgttctcctgccagaataccatgggctgttacttgccttgagttggaagcagtttgcatgtacacttgtaaatttattcatccttttaatttatataaggtttttttgtaacaattctcaattacttaagcaatgacaacaaattttggttttcttttgttatgtaagaacattaggccccagcaacatgctactgtgtaaggaaaaataaactgttgcagttaaaaaaaaaagttaggagtacaacctccaaggaatgcccttaaagagaacacttatgcatcttcagacatattaatgaagccaatatccaggggtagcagaggttatcagatagaagtttacatctccctgacccaacagtctaaacataagcaatccagaactgctacaccagcttcgttgtgtcaaggagctccttctttcatgtttaagccactatactttggtacctctcaacaagaatataggttaggttgctgtaacaaatacttctctgccactttatagctgacctatcttggacaaataacttaaactctatattcttttaactgtatctacttcacagggttgttgtcagcaacatgagactatgtcttttttgggggaggtagagtgggggtctcatatccctggtttctagcacagtacctgaatatagtaagcattcaataaataccaagctattattgctgatcttactcatatgccagatctaaacaaataatgccagaccttaacaactcaccattcagtatttccaataaagatctgatctaatccaaataatcaacatggtgtgcattagaatgatcactttctgacccaaatcatagaaaacatggtttgacaaaagatattatctgacttgtgaatttatttttatgaaaactcttatatgtagaaccactggtcatcaaattaatgaactgacttaacttttttaaatgatccacttgtattgggcagtcctggaaagtcaaaggcacattgccccaagagtactggttctgtccctgcctgttattattgcaagcttccactgttcatgcatacactgcagaaaagcctgatttttataacacgtttatgattgtgaacttgtattgtaataatacagaatctcaagaaaaataattcttctgttttctcaaaggaagatgggcactttttttgcttctacaaaaatagcatggatgagagttttcaggaaaacacatttctcttattgaagagcacttaataaacacacacctgactgctttcatttcaccacaagtggtgcccatttgccagtcatcgaagtaattcagtctgctctgttgaagtgatggattctacaagctgtgtaaggctgtcattaaggagaggatagattatagtctcatgcaggacattacagtacttacatttctcacccacacagcttatgaaacaggggaaacaagaagatgaaaataaaattaaacatggacttaatgcctttctctcccaatgaatggaatgagctggtcactagcacacactttttactacttatatataaagttccatttccttctagttaatataaaaagctttgacacaaagactgtgcacaaaattcattatgcagtaatttatgtctaacttgcctttgtgcctctacttttaaaatattattcttttttcaccctatttatacagccatttttccttctctataatttttacctacttaaaattctcatatagaacagagattatatctagaataagattcattaatttgggtgaattgaaaaagacaagcttgaatgaatgaaaagtctaaagtatggacaattatcaaaaagagcataacagcaacagctgacatgtgggagtttattacatgaaaatcactgggctttttaccttatattatctcatttagtcctcaaaacagtcctggagcaggtattatcataccatttttacaaattggaaaacagactttaagagatgttaactttcctagggccacatagctactaagcggtcgaactccttccaaagttgcagttgtctgactccaaagctcgtgctctttacaatcacaccaaactgctaggtttttttcttcaatcaataataatattaaaagtaatatctcagaggaaggttacaaaactctaaagtggtttatttaaaaaaaaagtatttaaaattagctcaacacttattttaggtaatatttacctggcatttatgaagtaactacttcacacaaggcatttctatacattaaaactgaccctcacaacaacctcataaagtagataactatctccattttacagatgggggaaaatactcagtgaagctaaggtcacatagctagtaagtggcctagtctttgcactatgccacactacttcattatctgccttacaagatctttctctaaagtgctagagaaatctgctttttaaaggaatagtgccatccccctgcaattttatttatactatttattagctcagcaaagctttagttcagagacaatgcaaaggtaaactttaacccaggccttgacctcattttcataaattccaaatttagtgaggtccatgttaatgggttttattgtatatggaaaagagtttaatagtcacttagcactgctctatccattaataaatctaaaaagccacacaaaggtgaaggaaggaagaacagtgacctcaaaactaaaacagataaagagtgcctataatttgtactccagcaaaaaagtcagaatataaaactgccaatacataacaaccaattcaatcttacaagtttaaatgctcattcatcaattaaagaaaattaacctaatcagatgctcatattaaagaatacagccatagcaattcagcaatgataattaaaagtccatttcaaagctctttggtgtgcagtgaaatgatctaacagcgaggctgcctggttcttttcacggtgttgtgtaaatgtgcacagtatgtggtcattcctagctgttgaacatgttcatcttcgctactcatgctgcacttgtttctgatgcagatatgcttctaggtacacaatgagtgggaaacatgtacaagatatgacagtgaataaagcacatgtctgcagcactgttctcaccatgcctacagccagttccataatacacaggggattttttttctccttgtaggtcatcaccatactgaaaatattctaaataaatcctacaggtgtcagagggggccacctggagcacttaagagtcccacaactctgtcaagttgcatcatgcttttttcttttcttttctttaggccaacttgtgaaagagctgccacatgcctctctgcaagggaaacagccttgggacacaagcaaagcaatccaggtaaaggatagccaactattctttaggcctgatgcactgtggaataggtggcagaagcagatttcaggtcccttaaagtctggccagactctcaataggtcacctacttcctggtgactgacagccgaggcctaaagggggccagcttgccgaggaccagcttgaggtttgcagttttggacacccagagtgaactaatctctcatagctattctccataaagtataaaagaataaacttcccacctgtaatcccagcactttgggaggccaaggtgggcagatcacaaggtcaggagattgaaaccatcctggacaacatggtgaaaccccgcctctactaaaaatacaaaaattagctgggtgtggtggcatgcgcctgtagtctcagctacttgggaggctgaggcagagaatcgcttgaacccaggaggcagaagttgcagtaagccaagattgcaccgctgcagtccagcctggcaaaagagcgagacgccgtctcataaaaataaataaataaataaataaataaataaataaaaacctccctactatatgaatgtaaattcatccaaatatctgaggctcccataatttgctgaccccttatctgtgttacctgactggtttgtccaccaggctcaccacagtattatgttaggattcagcctttcactttcacttccaactctcttggccacagcatcataattgctaccatttcttttataatcaattttgatttcaagtcactgaaagcattactgaaaaagaatatggagtttcactctctggactattcaatgtcatagcaagaaaaaaaccttcctgggtgtgttggataaactgagcactctcagaatccttcccaacctatgagttcctcattattattaatcaaatacctagcagtactacttctaggaatctatcttacagaaatagcagcacaagttcacaaaaacaaaaacattaccatgttcactacagtgttatttgcaatggcaaaagtgttaagtgatctaaatggccaacagttgaaggatgattaattatggaccatccatactcgggagcactgtgcagccattaaaaataacatagtatgcctctgtttactggcatgaagctatgttcagtgaaaaaaggatgatggacaacatgtatagagtgataccatatttggaaaaaataccactgtgtatatacagaaatatatgtgtacaaagggaaattacatgaaaagaaatatatcttagagatttgtaactataaatatgtagttatgtatatttctgttatgtgatattcaagtaaaaacatttctattgctgggcacagtggcgtgcacctgcagtcccacctacttaggaggctaagtcaagagaatcacttgtgcccaggagtttgaaactatagtgtgtgaagacagtgcctgtgaataaccactgcactccagcctaggcaatacagaaagactctacctttaaaagaagtttctattatatacttatataaacatatatttgcatatgcatagaaatatcggaaaggatatacattaatagtggtcacttctggaaagtgagtttggaaagacagaactttaagtttttcttaaacatatatgtgttgaggtttctaaaggattctgcaaaattgacacccctttcctctcctaggttctgagcaaataaagaaataatacaaaaataaaaacagatgggggaccagaatataacctttattctgattgaagccaaggtggaggaggtagcttagtctgaaatccaaaacacacatggctaagctatagaattatatcatcttggggccgggcatggtggctcatgcctgtaatcccagcaatctgggaggcagaggtgggtggatcacttgaggtcatgagttcaagacaagcctgaccaacaggtgaaatcctgtctctactaaaaatacaaaaattagccaggtgtggtggtgcacacccataatccctgctattcggaaggcagaggcacagatcacttgaacccaagaggcggaggttgtagtgagccgagattgcaccactgcactccagcctgggcaacagaatgagactgtctcaaaaccaacaaacaaaaaaaattgtatcatcttggcaggccaggacagcaaaagctgggatgagcccccagccttagagaaaatgtgtgctcttggtaggcaggcccttctccagatagaacgagcatggcagtaagctgagctagcccacttattcaccccaaatttaccaattaggtaagtcactcccctatagagtacagtgagaaagagggtctgtcaagtaggagtattgtctttgtctgagaaagtagttttagcatatctggggtggctgaagccatactgcaaagggttaaacagtgaatggtgaaaaggcagagactgcagagtagacaagtcaagaagaattgaaagaaagaaggctgggagcagggaatttaaaaaaggatttttttaaaggaagaggccaacaaaatgtcaaaggtggaaaatggaagagacaaaataatttacagggagagtctaaacatagtgatagagtcatggacataagtgaatgtggccacctcttactgagacatgaacaaaagggaaggaagagaagttgagttcttatcacaggaccaattctgtaaaaagaaggatagatcctaaagctaaatccagaaaacaaaaaataaacttgcagactgccaaagagctggctgtgctacagtcatgacaaaaactcagcagaaccaagacccacttgtaaatgttttatcaaactgggaaaattacaagaaatatgtgatttattatttctaagactgcttagattagtattgatatgtacatactctccatattatccaaaatcatgcttcataacatcagttgatttacatgctcctttgtccctgggagccctaaggaataaagtttttcataagaaactttgagtgatttaagcttgactggctctgtgcaatttttcattgcaattctggctaccattctaccatatgccccaaatcacaatgcagtataaagtaaaatcaaacagaccaaggattggtgggaagattcctagtctacaagtctggctccatacttttaactgatggagaccgaaatgtctgcactggaaatgtttctgtgtttccactgatctattttcatgccatggtttcaacagcttcagaagttccagtaagaaaaggcttcttctggtaaacagattcttttgagttaaaaaaaaaaaaaagagggaaaagcttcgtatttttcaacagtccccaaagttatattctttatcaggttttaaggttatgttccaagtctccattcctcggtgtggtttagctttacaaccagctgccccctcttcactagcagtttttgacgtcatccaggctttgcaaaatgtgtgctacagcccctactcgggcttttcagctgctatgaaagttatactgcatttggttaagtgtggaggctggcaccagggaggatccatgatggtgattatcatgcaaatcagcctcctgcaagtcaagctcctccgaggaggccttccagctctgcttcccccagggccgctccattgtccccagcacaaagctaaccatcttggctgccgacactggatgccgctgagattggttctcctgacagagattagtgggcagcaatgaatctttcacttggggtagaaatatgattttatttaagaaaataaccatacataattgggcttctgtcactttaaattttaatggtgaaagtaatatggaggcttctggaaccttaaattacggctttcagaagcttcacactgaatctttcaattattctctgtaagtactttctcaaagcatgtgccaccatgacattgatatcacaattcaaatctaaattcaaaactgactgcaaggctatgagctatgtgctggcgtgcatgctgcctcattttatctttgaacatctgacgaggcgaatcaagaggcactctcccggagcccagccagctgtttgccaaatattcaaatgctctgacatgcagaagagcctttcagatttccccacatcaaaattagcaacgaccccctatttttcccattagcttctggctcacctacatcctttcacgcaggcccgcctgactcactcagctaagtgcttgctcttgctcacctctcgggttcccgactccagcaattggatctggtgtgtgctgcagaatggcagccagttcagacaaaaccatgggggagagttttcaagtcagtgtttccttgaagtggatctgaaagagtggctgagctgatatttgcagtagtaggaaggcagagagcaaagacagcatgcaggttttacttacaatacattcattaggctggagcaaaaaatggaattggaaagacaatagccaggggaaagtgaaaaggctttccttttccttttattttggtgttaacttccttgttatatatccattttatcatttttaatatttttatcttcatattaaaacaagtggaaaggaatctttttcataggtctagctttagactgcttcaactatttttaaatgtgtcccctacctcagtaaacacagcaccacatttacaactgtaaataactaatccagttgcacattggttaatctacaatgaaaaacaacccttctttcacatttcaaaggtcctggaacaattttcctcagctggatgacttagaacagaggctgtggacagcacctggggagtttagaatgggaaagggactaaggtgccaagtggtgaagacaacagcccctaccccagcggctggcaaaatttcctgaagctggacatcaaaacccgggccagctgggtgaggggttccttcattccttccggaaaagctgggtctttacttgctcatttcctatgatgtgtttatacttggacagaaggggcacagcaggaatgctttcagggcacatttagggggaagccactctcacaggaatcatgaatgccagatgtcaaacaaacctgtgctgctgagaattctctgagcaggatgcaaggggcaccacatcacgtctgaggaaactgctgtcctgatccggggcctctccttagctacaggcaaaggcaggtagaaatcctttcattttaataataataaaaaaggaagctgctagtgtgagcataaaattacctaagaactagataggctgatggcattccagttctgccagtaaagtctattcattctctcaattcaaatcagcataaggcaagtaacttgcctctgggaaccatgggtggcagaggcaggaggcccacacgtggaatggccataaaacagacatcagtcaacagccttaccccagcattatttcctgaatacagactcaaacattgctttgcactgagatcaggattatggtgcccaagtaggcactcttgtaagtcactgaccatggacagagaaaattttaaaaatccatattgatttccaagtccaaagtagtacaattacaaatcttgtctaactttaacaccgacggcttatggagtgtttcaaatacaaaacagttctacataaatcattcactcaaacatttaccgtgctcctattatatgccaagtactatactttcatgagtcagcattggttaaataataatcttaatactactagatttctctgcaaaatttagcactgtggctcacccctccatcttaaaggccttcacttctgtaaaattatcgtctcttaggaaggtctgcctctcagactactctgtctttactaattcctcttccatggtcctcatttcattaaacccacaaggattgaggagcagtatagcaaaatcacctgggggacatatttttcacactgcacagatcccctccactcccatttgagaatcattacatatgtgaacccctcactattgctagctggagtaagttatttctcttaagagtctggggatgaaaaaaacaaaagctgaagatctctgtaccaaatactttctctagatgatatcatctactctcatgacttcaactacatgccaactacacactgatgacttcaaaaataataaagcccagacccacgtccaaatgcctagcacacctgttttcaaatgacctaccatcacaaactctacaagtacattatattatattttctaatatatataattttataatttatatcaaattaaatcataaattatataatttatatttttctctcctttttcttaatagtattagtatttactatatgatcaaggtaactagccatatttatactccttcttctccttcacacttcccattctcaccccacatagatcaaatctgtcaccaggtcctttctcttcttcctcaagaacacatttcaagtgtatctacctaccatttactatatcccacttggacctctgcattagcctcctcaatcctccctaccaccagcctctgcacttcagactattctccacatgcttctgattcctactgattaaagcaggaaatccttgaatgcattcctcataatatacaagatgatttctgatagcaaacagaccaacttcttaaatattcatattttaataggtttcaaaaaacagaattaacacatcaaactgggtgtcaagttaaaagtttgctttaaaaataaatttcagtataaaactcgggcaatttaaagaaaaattaatctattcaggtagtgtgagatgttttaaaaaagataaaagcagtacatgaatcaatgatgttgggaagcttggtactagaaagtaggtctaaactccttaatatggtatcagatatcttaaactccttaacattctctccatttttagcttctccctctcctacatttcctgtacgctacatataaattctgtgtatcagctttgctgaaaaacaaaacaccctaaatttactagctaaaacaacattttatttagttcatacgtctgtgaatgggctgggcagttagttccgtccgagctgacaccccagagagatcaggggaaatctgggctgacaaatgatttcccctggacactcccatgtgtttgtgatcaaatggtggatcagctggtagtagatgatctcactcgcatgtttagcagttcgatgactgctggcaagagcctcggttcttttctgggtgaccactcatcctgcagcacaataacctgggctcattgacaatacagtcacagggttccaagtgcagaagccccagtgcatgagtctctgcactgtttgctaatatccactggtcaaagcaagtcatatgatcaacctagattcagtagagaaagagagactccacctcttaatggatggatctgcaatgtcactttgccaggagttagaagcaggaaagggaaattggtgactgtttttacaatcaaccaactcttaccatccatcaaatatgccaggcatattcacacacatgctcatgctgttcccatcacttaaaacgaactctcaacttcctcctgtccttctgggaaattcttattgcttgtccttcaaggctctgatcaaatatagcattccctgacaccttccctcaaggcataattaattattccctcatacgttcccatgatcccttgcattgcctctattatatcattcagtgaattgtattatagttatttataatgtcttataaagtctctctccttaaatagactgtctttgtaccaccagcatctagcacaatgtctggcaaagaacaggcattcaataaacgttcaataaattaaattaaatttaaaacaaagattaaagtctccctgggatatgcctacattaaaaaagatttaaggtacaaatacaaaactggcctcatgagttagcagaactaattagatccatctcacctaattttttttttttttaagatagagtctcactctgtcactctgtcacccaggctggagtgcagtggtgccatcttggctcactgcaacctctgtctcccaggttcaaggtattcttgtgcctcagcctcctgagtagctgggattacaggcacaaaccaccatgcccagctaatttttgtatttttagtagacatggggtttcaccatgttggccaggctggtctcaaactcctgatctcaagtgacccttccaccttgacctcccaaagtgctggaattacaggcatcagccaccatgcccggcccacctcatctcatttgaagggcaccaggcagggcaatgctccttgccaaaagcattttttcctgtgggactggcacaaagcctgaacttctagcataatttattcaaggtctgaacatgttttgatgtaatacaaacaacataggctctggagtcaaaaatactactaggactcaaaacctaactacctgtgtgatactgacaattcattttgtgcatatctctgcactacttttttcatccatacaattatctgtgttgcagtaacacatgtaaagcagctagcacagtacctgccatacacccaacactcatatcaaatcacaaagtctcctgtttaaaaagcaaatgcccctggcagggggtaaccacaagccctttttattgccatctgagaagagtgggaaaaaggtaaaaggaagaagagtgggaaagtaaagagtggcagataaacaacttcgcagttttactgagagctgggcttgtggctagtgatgaaagttacatcagtttttagagatccaaccaagtaataaaagttccccccctcccgccaaggcatataatgaccatttctggtagtacaggacttgggaactgcataatttaggactttgggacttgcataatttttctgggcatcgatatggaatcaccatttataagtatacctagacaagactactgaagagttagttaaggaagaaacagttatttaaatgttactctgatctttttcatgtataatctcttgcccttgtccttcatttaaaaggggcaactgtaatggtagtaaacaaatttcctccttacctaaggatacaatttttttaagtgaaaaaaatttaaagaacactacaaaacacacaattataaactttatatcgcttctaaaggaaatattgccattgaaatcaaaataaaatgagttttagacacacttatatcctgtttcaaagtaaagccaagttttaataaaatgtttaattttccaaaatccaagcaagaactcctatgagaagtccctacagttgtccctcctgaggctgttctcacatctcagtgacaaccctgaaacacttctgcacttcgggagcactaaaccaatctacttttgttgacatctaaccctgtaaatgaaactccactgttacccatgatctttcaccccagctacattgtaaacttcctgttacccaagattctgttttctgtattttcctagtccacctgtccctactctcagcacccagatttgtactcaataattgttaattcatggctgacaaggaaatgtataaataccacttgctgacagtaaattctttggtctgttcaagttcagaccaagacctctagagatcctaaagactgaaatgactatggtgccccacattcacatgtaaattaaaaaaatactaaaccataaaggacaaaatgtacacgtatgtttttaaattaaaatagtttctgatggcaaaattctaggtaagttcatcaaaggctgaactcttcttcattcttttccctccccattatgagagcatacatgtgtatgtgaaagagagagaaagagagagagagagaggtgaggggagagggagcgagggaggatgaatctgtctgtgacttccagcactgtctgctatagggtagtccaattctgggtccacttcataaactatatcaaaatgctaaatatagttatggatgctatacagtatagaatgagcaatcaaataattgcctaaatccatattcatatttgctgttctcttgttaagtatccaaattctatttcaggtttgtagtaagagagcttaacataatataaatagaagcaatgtaatatattatttcacctgctcttacaattgtattgtggttgtgtgtggaaaaggaggtacagcaaatgattgtcagcaaatcactcacaaaaatgtgagaacttcaagttctttgcactttatttcattagacaccaatatttgataaaagcaacaagcaccaaattatattaatataaaccttccataaataatgttcacagcagtcacaaagtttaaaatacagatgctaattacagtgccaaatcaaaactacaatatttcaattaaaactattttcacttgtaatgtgattatcttattcatagtaacaggtattaatatttctattaaacctgaataggttgtgcttagccataattgttccaatggatctgtttccagttttgtattttaaaatccaagtgtattccatagagttaaatagtttattctgatgtacccaggtagacttttgtcttataatagaaaatgtttggatatctagggaaatggcatcagaaaaatcaggaaatgcttgtgattgtacaggtacttcacttctgattatataagtactttaaaaacagtaaaaattttaaaccctatacttgcattgaagtacagctagaatgcaaatttagtaataaaactgaataatttagtagcttgttttgtgatcagatctgattggtactctctaagacgtatccaatttttaaaaattctctctgtggctttgaactggggtggatgcatattatgtccattaaattggaagccaagggttacttgaacaaataatattatggctttgtagaatgactaatggtctttgcaaaggcccagactggcttcatctttcttaagattttatcactgatttgttcttagtcatgtgcagtcactaaaggcagcagaggcaacaagtgtttgatgtatgatacttgagccacttttgtcagagctgcatttatttttatgctatactcattcttggtactcttatatgtatgtggttcttttactttattttttttcttgtttccagtgatgggtcaaacagatacagcaattataataacactaacctctaaaactctacgaaataacaaatatctacttccttgcaagggatgactttacattgcagattaaataaatgaccacagaagcaagcatcctaatataagagtttaactctttgttcactgccatatttgcacagcttacaaaatatcccttaccttttagcatatattatcaatttcaattcaatccatcctgtgacaatctgcagcaagtcacagaagtgctcttctagttgaaaggaaatttcaagggaggagggatgtggaaaaacacatttaatttattctattgaaaggggacattctaaatggtttctgagctcttttgcatcttcttacacactgcaaatcagctcagatatcttaatcagtggctataaacatatccttatcagtaacatattcatgaaagatggtatgtgtatgagctgcaaaatgtttggcagagacccaagaatacaaaagaaagaatatggtaaagaattgatggaatatctttgtgtttcaaccctattcattctgggaattttctatcatctctgttccatttggaaggataatagacaaaccaacagaatgtcaggtttctgtgacttggtttcatctatatacagttacacatattgtacaatgatccaggatggaagcatatctgtacacaatgatgaatataagtacataatatataccttcttgtgtctctaaatttttctattcatgttattatcttatgcagagtttagtgcttttctgttttgacaatctaagcactgtctaaacattgtttcatgaaatcaagagtagtcctcgacaattaatttttgcagtcaatggtcttctcaaaatgggcaactccccttggaacttaggagccacaatagcagactgtgtgagtgagggagtgagacaattcattagtcgattctgcagcaactcaaagtggcgggggatgtcagcccctgctctggtgcttcaatactaatgagagttattgcatattcataaccccaaatacagtcagcttcttgtaaaaacttttgtcacccaggcttcatggcaagagcgaagcactgcactcttcgtgtcgtggcacttccgccaagtgagagtgagagcaagattgattgctttgcaacgctgcctgacggggaactaaaagatgctgccccaagggtcctaaaactgcttagtttgattgcaaagctccaaataatcaaagaaacaaaaaggaggcattggtggtgaatgtgtatgtcgatatatacatatacaccattaaaaatatatcaaaaaatactccaaacaagaaatttggcttattcagtattcagagtaattatctgttaggaatgtaaaattctcacatcaattcttattatgccgaaagaagaatggtgtggcccagtaaacttgttctcatgttgcagaaatgccatgcatatcttaatagaaacaggtttctaaaactgtctgaagtttcccgtcattatcaataccaaagcttagtgaactgaacctgtcagttctgccaaatctagagctacctggaatccaattcctcaggagcctttttgtgttgtcactgtctcccttgctttatcatcatcatcatcatcatcatcatcatcatggtgagtgtccagaaatgagccatccagtgtgcctgccaggaaatcctaaggggtcagcactataccatctgaccccaaaatacctctgtttggggtagctaccagcatcccctggagtcagagaagggaaatgtatgtttcagcacccactttgaaaaagccttgagcattttttcactcgtaatgatgtcttcagctggaatgccagcacagttacacatttttctgacagccatacaggctataaactacccataaaaattaaataaaacaggacagtgaaagaaaactttctaaatttgatcacacttgagttgttaaaagttatttccagatgcataatgtgtataaatatctgcatagctaaagacaaatcaggactactgagatgatggtgggggggagatgatgaggtgttgtgggggatgggtctcaccaaactgttttatatcttagtcacagacacacaagctttgaaaatagacggatttgtgtttatgattgattgaggtaactgattatccacagatattttaagtgttgagacattaaattgtcagctctatcagtttgattgcagtaaaacatgaaaacattgacttttgtctagttagagaaatttatttttcccagaatgacaatcctttaagtagacaccaggcagcttgccagatttccatgtcatacactgaagtttgcaaatgcaacccatattttcaagtgtttttcaaggtgcaatgaatggtgcataggtcttttgcaaatagtcttgtaataaacagaatcctgcagtatgtttcattccgtaaacccaagaaaagtatttactcattttgaagacgaaaaacacattgtagctttgtattcatggagtacatgttaccagtgctcttcacttacttaaagtatctctcaaaaataaaataaccctctttggaccaccacactgtaaatgagtttgattaatatgttttataagcctgaaataaatgctcatcataactgtcagtgagctgacagctttcaaaagtctttgttcccagaatgagtaatttttctgatcttctttaaaataccggtctaaaaggaagatgttaaaatcaagtacattctaccaaaatttgattgctgttaaagcagccttgtattctgactccctgcatagactatatgcatgtatactacttgacaaaataaaaataccacatcttatttattattattgcttgtcagaacacctgtgcttttcattgggcagaactgtggttcagtgtttaagacctagtccattataagaataaaaaatgtcagatgttatatatagtcaattcttttagtaaaaattgaccaggaaatcatcactagacccgatgatttcaatgaaaacaccagtcaaaaatcagatgtggtcattaattctactgaaacaccaacatctctatatttgctgcatattttccaagtacttaccatgatcattaaaatacagaatgttccaaagaccaggggacaccattgagccctccatgtctgaattctgcagacagcagtagataatacctgatgctaggaaaggaacacatagagggtacctaagtagctgagcaaggctacaccaactagaacaacaaacacttcttcctgactcctttagccaatcacttgtgtcctggagcattgggtttggttacccttcttaccatatctcagagagtaaaataactattttaaatggtcattaaattatccattcccctatttctccattccaactactgctgatgcgtcatagctgttccctggcagaacttcacaaagcaccctgcctgtacgctgcctacaattatagcttcttttgtcagcatgttttcctccttaattcggtactacctgctctcataccatgcccacaaaggttgaagttacagattttcccatatctttttgtgtaatttctatttttcctaatctttaagaaaggcttattttataacagtatatcacatttgtccattagaagtcatttttcattttattattttccaaatagccaagaaaccacaggttttatacatgctatcactggcacattgtgagcattactgctcttcttgttcattttgatatatgcattattcaacttttagtaaagtatattttcatgcttctcctatgccatgaccaccccttataatttctgatacattgtggcagttttgaaaacaaagttctctcgtatcttatagactaatttccccacttttgttataccttatctcttagtgagatataaagttttagtatttcgcacatgaattaggtcaaaagataatttattttcttcttcgttgttgggttttctcctttaaggaaactagaattcccttgtagccagcctaaaacaatctatatgctatttacatgcccatgataatcccataattccagtagttccacattgttttctagaccttcaaattctgttcttctcaaagtactacactgactggagattatgttgttaactctaagaaacaaagaaatgatacctggctcaggcagggttcctctcttttgacgtaatgaatgctatctccaagtacagtcatacattgcttaacaacagggatatgttctgagaaatgcattgtcaggcaatttcatcattatgtgaacatcacaggatggacttatacaaacctatgacattatgtagcacatgactgtatagagatggtactgactcagtacaagtgttaaagtggcctgaagtaggatgcttttgacattgctcaatgcttttgactgcttccttgtctattctgaatcattttttatctgtcctctagttttaaaagtcactatgaccttgtcatttagtgagaggagccatccttaactatgattataaacttaaataattatgctgatcagaatttccacacttcactccttcctatgcctcatttcagttgcacgtatttacttttaccaaaagtaaaatttattgcctctacttgaatttcttcctaatgacctacacgcagcctccctcacaattcccagagccctcaggccaagtgtagactttgccttattttttttccatatgctctttttttcccatatgctctttttttagcgtctatcaatatttaccaataatatctgcacattagcaatatttaaaaggacaagtagtctcttcttacagctaatgaaacattagtgtgtcctttcttattacctataaaactattggcttttgcctttttttcattgctagaagggatgatcagtttagtgcagtgatcttcaaattatattcaggggtgcctcagggtccttcttagaagaaaatggatgaagtggggcaccaaacagaaggagagttccaggcccaattcatccagcccactatcactttttgttttcaactttttattttcaaataattttaaacttacagaagagtttcaggcatcgtataaagaactcctgtttgtgtttgacccacattgttaacattttgccacaattgctgtatcattctttcttgcccttccccttccccctctcttctctatgtataacttttttctctaaattgtttgaaagtaaattgcagataccatgtttcattacctgtaagcagttctgtgtgactttcccaagaaaaaagatattcacttacagggtcaaactacaataatcaaaatcaggaaatttaatattgacataatgctattatctaatgtaatatgtagaacttatttgaatttttccaattgtccccaaaatgtgctgtatggcaatttttgtttttctggtccagaatcatcctttcattgtctttcacaacattgacctttgtaaatagtacatgcaatttcctttgtaaaaatcccccaatttgggcttgtctaattttttttataattagatttaggttacatattttggacagcaatattatataaatgatgttgtgttcttctcagtgaatcacatcaggaagtacatgatattggtttgtccaattattggcaatgttaattctgattacttaagttgttaaggtggtatctacctggttactccactataaagttctttgtaattaaaacctattttatgctttgtaagtaaaaagtaacttacgggtagatgctttttaagatcttgtaaatatgctggtcctcatcagattctcattcactggtttagcatccactgataatttgtttaattgctatagtggttgcaaaatggtgattttctaatattatcattcctcctacatttatcagttagtatcctactcccttgtttgtttaagtgtgaactcatgatttttttatttttatttaatgggttgaaatcattattctcattattttgaaactcaaattgtctgagtttggccagtgagaagccctttgatctatcagacttccatggttttctgacatgtcccatcataattggagctgtattatcactttatttgttttctgatttatttccaagcaatgcttttaaaagtttaaaatagattgttccactataacactttttccccaatttgcctcatttcaagtttgtataaatagtacctagaaaatagagaagacaataaatgatagtagcccctttgcttctgtggccacttggtcaccacactgttcctgcaaactactgggtatgctcctgcagtagggcttggcacccaccataccctctgcctggaatgcccctcctgatgccccatcagggctcgctcccccatttccttcaagtcatagttctatcatcctcttctcaggtaggccttctttgactactttattgtagtaaaactcctttgatgataaccccttcatttccaaggtttcatcccaaagcaagacaattggtttaacccatcaatggttaagtcacaaacatggcattaacctttgttggattattttaccatagtggattgacaaactccataaagtgcctactggtacacacacagtccttctgggtcatgaaaacaaagtagatgttacccaccctactgcttctgtcttctttattcaatactattccccataacacatccacttctgtatcactttattatagaattaatctaatgtttaaagctgtttgtatcaataaatatgaaatcaaataaaagcatcaacaaacaaggatcaagtagaactatttgtcttttcctacagaacattctctaaaagaaaatctgtttaaattgtaacactcaccatttgcttttcccaagtgttttaaaaaacaaacagaaaaccctcaacaaacaatcacagataataatcaacatcaaagagatacccacaggctttacaaatagtcaagtgctttcacttagtcattcaacacagaaactcacttttccctgagaacattccctcaacatacaattcaaagtgactgcatttcaccaattagaattaaaggtatccccaccaaaatgcatagcaagttccatgacttactgagtttacccaaagcaaactcagtaagctattaccatgtattgccagtttcttaggtcttcttaagtttctcaaatgacttacctagtctttttctaaaaccactaacatatttcagacattcaaaagtatattatttccaactgctgtattgagggcactaggatggctgacttttcccatcaatgtctgtttttcattaaattacttaacagaaatcttttaggtttttgagatgcttctgtactataaagccaatacatttgtcaacatggtaaataagttcacaaatgtgaacatttgttcacaagccacaaaattatgaggcacctcattatataaaataatggaacaaattctaccaacacgtaatatattcccaagggtaaaggatgaacattaattataatttaaatcacctgactacctggtccacttagtgaaatcctggagaggtttacactcaaggacctaatgatacaacctacagccctaatttaccttccaagatgcctatattagacacagtaatacctagctgattttaagtgaaactcattatctccaaaaaaaaaaaaaaattaaataccatgtaaattcactgaccatttgttttttcattataatgttagctattcttggtattcaattgtttaagataaaaaacataccacagtatttagtcctctaacatacaaagaaaaactatattcatcatacatgataaaatataacttcttgttcttgaggtctagaattgcactgtccaaaatagtagtcaatagctacacatagctattgagcacttgcaatgtgtcaagtccaaattgagataagccgtaaatgtaagatacacaccggatttcaaagatttagcatgaaaaaaatgtaaaatatctcactaataattttatgttgattacatgttgaaacaatatttcgatatattgggttaaagtatattataaaaattaatttcacttgcttccttttaggttttttaatgtggctactagaaatttttaaattatgtatgtggctcacatttgatgtttgcatttatcttatttctattgaagagggctggtctggactaaaagcaggcaaaagtcacagttataaggccagttccatagtgtgttataaatatactgccaccacacaactctctcattttctgagattgttagcagatcatcaaacctcaaaagcagcagaggactaagcctaggtgaattcagtttgtgatgaataaaattataaattttacacatattaagattctatcatgatgtttaattaggcaacacagtaaccacctgctgtaactatcttacaagcaactatcacgttattaacatagccaaagtttatatattttattgttttattatctcatttctataaacactataccaaatattccttcaaaacagcttattatctactgaatacctttatttagatatcatgggcatttcaaattcattatgtccaaaatggaaagcattctcttactgttgaaaggtaattgtccatggtgtttttatttgtctctgagtaaagacaggatatgcttctgggttagagggtacatttgtttcctgaccagcataacaaagataatgtcaacctccaggacaatgattttgggcaagtttgcaagtagcctcttataagattgggaggacacaggtccaccgtgtacacagcatctgtctgggcctcactctgtatcatgggatttggggaattcatagatgcatgaagatcatgctgcctactttgctttgagtaataaactgtctaaatctatctaggctcattgtctccttttcaacggaatctacagaagtgtggtgagccagcccagcagctgactgctgcttgaaactgcttgatatttactttcccttttactttctcaatcttcgtacaagcatcactatatacccactgcccaagtcagaaacctgaccatcaatcttgactcctgcctctcattcaccaggcccaccatatccagtcaactgccaagtcctagtcattctatctgcttaatttctctcaaactatctatttatctccatccccactactttaaccctagttcaggtcattatcctctcttacgtagatgcttaatttgtgccactaaaccagtgttaccccacttcactctattctccatactgcagctggaatgatctgatttgtcatttctttgacaggataaagtccaagcttcttaggatgacaaagtatttcaaagccaggacttacatagaatgtttcttggaattccatttgcgactgtttcacctgagggggaaaggaggtggaagaggagaaaacaagagattagtcccacttctaacataaaagacttgggagaaaaaggataagctgggtgctatggcctagaaggagcactctaagagagctgaaccttagtggaactgccagagttcctttcttccttattcataaaaagatttgatggttattatgtaaggtgatgaatatgtaaactacctcaattgtaataatcattccacaatgtaaacatatatcaaagcatcatgttgtataccttaaatatatacaatttttatttgtcaattatacctcagtaaagcagggaaaaaagatttgaatctgactaaactcaatgacttcctctgttagaactggtaaccaaaaattgacctaacatagccaagaaggaccattattactttactcactgccagccacatttattctgatgaagagaatgtgccatctgtaagcaatattactttcttgttattagatttttgaatggacaattagtgccacatcttttccttttagttcatggcacccaataaaaaggcttttttcttttttttgagacggagtctcgctgtcacccaggctggagtggagtggcgcgatctcggctcactgcaggctccgccccccggggttcacgccattctcctgcctcagcctcccaagtagctgggactacaggtgcccgctacctcgcccggctaattttttgtatttttagtagagacggggtttcactgtgttagccaggatggtctcgatctcctgacctcgtgatccacccgcctcggcctcccaaagtgctgggattacaggcgtgagccactgcgcccggccaaggcttttcttttaaaatgtctgatgttaaaaaatgctcaaatcagttgaatcatgtagatggaatggggaaagttcagaccaagcctccatcctcatctctcatccatgatgttttctctgccttgaacagattttcttggctttttgtctgattaagcccctcttcattacttagcttaaattttatctcctccaggaaggctcctctgactctcaaagtagcattggatgtctttcctatgaattctcttagcatttaatacttgctcatcatgtttcagcatttagtacacagtatttaaatgatatatttgcttatctccccaactagacagtaacctccttgaagacaatgtgtctaactcattattttatccccagtggtagcatcatgcctagcacataatagacacccaatcagtaattattcattataaacagataaataatcagataagtctttggaaagtaaaaaagggaattacaatctttttaaaaaggaggagaaggaaagtttaggctgtggagtttttcttatctccacccacattctctctctccctcaatcctctttctctcgctcgctctctctctctgtctctctctctctctctctctctctcacacacacacacacacagagaaagttaattttatgtatcaacttgactgggccatggggtgcccagaaacttgattaaacattgttactgggtatgtctccaaggatatttctagatgagattaacttttgaatcagtagactgagtaaagcagattggtctctccaatgtggatgggcgttgagcaacccattgaaggcctgaatagaattaaagactgagtaagaaggaattctttctctctacttgtcttcaaactaggacactggtttctcccgccttcagacttgtacaagactggaacttacactattggctctcttggttctcagaccttcagactccagctggaactataccacgagctctccctagtctgggtttctcagactccacaatcaagtaagccagttttttatagtaaatctctcactcactcactcactctgtttctgaagatatctacatcttattggttctgtttttctgaagcactttaatacacacactgacatgccatgtcactgatgttttccctaatttcaacagccttcctagtcctaggtttgcagtttcagcactaccagctttcatgaggaaaaataaatgcattttttcaaatatattctttttatctcatctaagcctccaaacatttcttacaactggaaaggcctgtatacagcaacaatgtagatcatcttactttactcctttactccaaaaacccaataggaaaatgtgtcttaaacttccaaaatacaaatactagaccatttattaactatatgctgctaatattcaccttcttacatttttactaaacctaatatttcttcacctttgaaaactttagagataacataaagtattgtgattatagaaattaatcatctttttcatgtaaggcagagttgaatgtaatctctacataaatcaagtttgtttccaggccagaagaacgaagatggtgaagataggatgacagctaaactggacaacttgttcattaactttttagcatcaaagacctttatctttgcccactatcctttccaaagacctgaggtacttctggcctctggttctgaattttggaaagagaagcttagaatgctgctaagctttcttccaataccttacctagagtgatcaacatagcacctcaaaaaagtcaaagaagagagaccttcaagtcaactgatgtaccatggcaggtttcaagaatgtctgtgatcccaacagtgcaaacagctgagggaaattctggtggcctggaggtcattagtcggttgcccccagtttaaattgtcagagttttctttggccactatctgaaatgaaatgatttcagaaagatcaaggtagctcaactttataaccaagttcttttagatatggaaaacaaagttcttaaacttgtagagcattctacttcagagtaagaataagtataacatcactgtggagataaatccatgttctaggaatgactctgcaactttaaagcttcctgagccttggcttcctctttgtcataaaaattagttaaaaaacaatccaatgtgcctgtaacattatataccatgtgtagatgctcaacagaaggcagtcataattttgtaagattctccctaagaagttagcaaagtacagcctgcagggcaaactactcaatgcctgtttttgtaaataaagtttcattggaatacagcacacttatgactacttctgtggtacaatgacagagctgagtaggagaaagagtaatgacagttataacagagactgcatgacccacaaaacctaaaatatttactctctggccctttatagaaaatgcttgctagctgggggttccaagatggccaaataggaacagctccagtctacagctcccagcgtgagcaacacaaaagatgggtgacttctgcatttccaactgaggtgccaggttcatctcactggggcttgtcggacagtgggtgcagcccacagagtgtgagctgaagcagggcggggcatcacctcacccaggaagcgcaaggggttgggcaattccctttcctagccaagggaagccatgacagacggtacctggaaaatcgggacaccctcaccctaatactgtgcttttccaatggtcttagcaaatggcacaccaggagattatatcctgcacctggctcggagggtcccacgcccatggagccttgctgactgctagcacagcagtctgagatcaaactgcaaggcagcagtgaggctgggggaggggcacccgacattgctgaggcttgagtaggtaaacaaagtggctgggaagctcaaactgggtggagcccaccacagctcaaggaggcctgcctgcctatgtagactccacctctgggggtagggcatagctgaataaaaggcagcagaaacttgtgtacacttaaacgtccctgtctgacagatttgaagagagcagtgcttctcccagcacagagtttgagatctgagaatggacagactgcctcctgaagtgggtccctgacccctgagtagcctaactgggagacacctcccagtaggggccgactgacacctcatacagccagatgcccctctgagacaaagcttccagaggaaggatcaggcagcaacatttgccgttttgcaatatttgctgctctgcagcctctgctggtgatacccaggcaaacagggtctggagtggacctccagcaaactccaacagacctgcagctgagggtcctcactgttagaaggaaaactaacaaacagaaaggacgtccacaccaaaaccccatctgtacatcaccatcatcaaagaccaaaggtagataaaaccacaaagatgaggagaaaccagagcagaaaagctgaaaattctaaaaatcagagtgcctcttctcttccaaaggaatgcagctcctcaccagcaatggaacaaagctgcatggagaatgactttgacgagttgagagaagaaggcttcagatgatcagtaatcacaaacttctctgagctaaagtatgatgtttgaacccatcacaaagaagctaaaaaccttgaaaaacgattagacaaatggctaactagaataaacagcatagagaagaccctaaatgacctgatggagctgaaaaccatggcgcgagaattacgggacgcatgtacaagcttctgtagccgattcgttcaagtggaagaaagggtatcagtgattgaagattaaatgaatgaaatgaagtgagaagagaagtttagagaaaaaaagagtaaaaagaaaagaacaaagcctccaagaaatatgggactatatgaaaagaccaaatctacatctgactggtataccttaaagtgatgaggggaatggaaccaagttggaaaacatgcttcaggatattatccaggagaacttccccaatctagaaagacaggccaatattcaaattcaggaaatacaaagaacaccacaaagatattcctcgagaagagcaactccaagacacataattgtcagattcaccaaagttgaaatgaaggaaaaaatattaagggcaaccagaaagaaaggttgggttacccacaaaggcaagcccatcagactaacagcagatctcttggcagaaactctacaagccagaagagagtgggggccaatattcaacattcttaagggaaacaattttcaacccagaagttcatatccagccaaactaagtttcataagtgaaggagaaataaaatcctttacagacaagcaaatgctgagagattttgtcaccaccaggcctgccctaaaagagctcctgaaggaagcactaaacatggaaaggcacaaccggtaccagccactgcaaaaacatgacaaattgtaaagaccatcaatgctaggaagaaactgcatcaactagtgagcaaaataaccagctaacatcataatgatgggatcaaattcacacataacaatattaaccttaaatgtaaatgggctaaatgctccagttaaaagacacagactggcaaattggataaagagttaagatccatcagtgtgctgtattcaggagactcatctcaggtgcagagacacacacaggctcaaaataaagggatggaggaagatctaccaagcaaatggaaaacaaaaaaagcaggggttgcaatcctagtctctgatcaaacagactttaaaccaactaagaccaaaagagacaaacaaggccattatataattgtaaagggatcaattcgacaagaagcgctaactatcctaaatatatatgcacccaacagaggagcacccagattcataaagtaagtccttagagacctacaaagagatgtacactcccacacaaaaataatgggagactttaacatctcactgtcaacattagacagatcaatgagacagaaagttaacaaggatatccaggaattgaactcagctctgcaccaagcagacctaatagacatctacagaactctccaccccaaatcaacagaatatacattcttctcagcaccacatcgcacttataccaaaattgaccacatagttggaagtaaagcactcctcagaaaatgtaaaagaacagaaattataacaaactgtctctcagaccacagtgcaatcaaactggaattgaggattaagaaactcactcaaaactgctcaactacatggaaactaaacaatgtgctcctgaatgactattgggtacataacaaaatgaaggcagaaataaagatgttctttgaaaccaataagaacaaagacaaaacataccagaatctctgggacacttttaaagcaatctgtagagggaaaattatatcactaaataccaacaagaggaagcaggaaagatctaaaattgacaccctaacatcataattaaaagaactagagaagcaagagcaaacacattcaaaagctagcagacggcaagaaataactaagatcagagcagaactgaaggagatagagacacaaaaaacccttcaaaatatcaatgaatccaggagttggttttttgaaaggatcaacaaaattgatagacaactagcaagactaataaagagaaaagaaagaatcaaatagacacaataaaaaattataaagggggtatcaccaccgatcccacagaaatacaaactaccatcagagaatactacaaacacctctacgcaaataaactagaaaatctagaagaaatggataaattcctggacacatacaccctcccaagactaaaccaggaagaagttgaatccctgaatagaccaacaacaggctctgaaattgaggcaataattaatagcctaccaatcaaaaaaaaaaatccaagaccagacagattcacagccgaattctaccagaggtacaaagaggagctggtaccattccttctgaaagtattccaaccaatataaaaagagggaatcctccctaactcattttatgaggccagcatcatcctgataccaaagcctggcagagacacaacaaaaaaagagaattttagaccaatatccctgatgaacatcaatgcaaaaatcctcaataaaatactggcaaactgaatccagcagcacatcaaaaagcttatccaccatgatcaagtgggcttcatccctgggatgcaaggctggttcaacatatgcaaatcaatacatgtaatccatcatataaacagaaccaaagataaaaaccacatgattatctcaatagatgcagaaaaggtcttcaacaaaattcaacagcccttcatcctaaaaactctcaataaactaggtattgacgggacgtacatcaaaataataagagctgtttatgacaaacccacagccaatatcatactgaatgggaaaaaactggaagcattcccttggaaaactggcataagacagggatgccctctctcaccactcctattcaatgaagtgttggaagttctggccatggcaatcagggaggaggaagaaataaagggtattcaattaggaaaagaggaagtcaaattgtccctgtttgcagatgacatgattatatatttagaaaaccccatcgtctcagcccaaaatctccttaagctgataagtaacttcagcaaagtctcaggatacaaaatcaatgtgcaaaaatcacaagcattcctatacaccaataacagacaaacagagagccaaatcatgagtgaactcccattcgcaattgcttcaaagagaataaaatacctaggaatccaacttataaggggtgtgaaggacctcttcaaggtttgactacaaaccactattcaatgaaataaaagaggacacaaacaaatggaagaacattccatgctcatagataggaagaatcaatatcgtgaaaatggccatactgcccaaagtaattcatagattcaatgctatccccatcaatctaccaatgactttcttcacagaattggaaaaaactactttaaagtttatatggaaccaaaaaagagcccacattgccaagacaatcctaagccaaaagaacaaagctggagacatcacgctacctgacttcaaactatactacaaggctacagtattcaaaacagcatggtactggtaccaaaacagagatacagaccaatggtacagaacagggccctcagaaataataccacacatctacaaccatctgatctttgacaaacctgacaaaaacaagaaatagggaaaggattccctatttaataaatggtgctgggaaaactggctagccatatgtagaaagctgaaactggatcccttccttacatcttatacaaaaattaattcaagatggattaaagacttaaatattagacctaaaaccataaaaaccctagaagaaaacctaggcaataccattcaggacataggcatgggcaaggacttcatgactaaaacaccaaaagcaatggcaacaaaagccaaaattgacaaaggagatctaattaaactaaagagcttctgcatagcaaaagaaactaccatcagagtgaacaggcaacctacagaatgggagaacatttttacaatctacccgtctgacaaagggctaatatccagaatctacaaagaacttaaacaaatttacaagaaaaaaatcaaacaaccccatcaaaaagggggcaaaagataggaacagacacttctcaaaagaagacatttatgcagccaacagacacatgaaaaaatgctcatcatcactggtcatcagagaaatgcaaatcaaaaccacaatgagataccatctcaaaccagttagaatggcaatcattaaaaagtcaggaaacaacaggtgctggagaggatgtggagaaataggaacacttttacactgttggtgggactgtaaactagttcaaccattgtggaagacagtgtggcgattcctcaaggatctacaactagatataccatttgacccagccatcccattaatgggtatatacccaaagattataaatcatgctgctataaagacacatgcccacattgcggcactattcacaatagcaaagacttggagccaacccaaatgtccatcaatgatagtctggattaagaaaatgtggtggcacatatacaccatggaatactatgcagccataaaaaaggatgagttcatgtcctttgcagggacatggatgaagctggaaaccatcattctgagcaaactatagcaaggacagaaaaccaaacaccatatgttctcactcataggtgggaattggacagtgagaacacttggacacagggtggggaacatcacacaccagggcctgtcgtggggtggagggaagggggagggatagcattaggagatatacctaatgtaaaatacaagttaatgggtacagcacaccaacatggcacatgtatacctatgtaacaagcctgcacattgtgcacatgtaccctagaacttaaagtataaaaaaaaaatgcttgctgactcccacttataacacagatttcaccacaacttgtaaaataacacaatctcatgttaaacaattaataaacccaataagctttcctgcctttctgtccttggggtcccaaatcatctgacaagatagacctgtcaaattgtttgatagtgtgaaaaaaatcaaaagcattttaataagctttaggatactcaaaaatttaacatgaaatgcacacaaagacaatggctggtctcgtggctctttctccttgtctagcctcaattgtgagtggatatagccaaaaacatctgatagggatggggatgcaaaacaatatgcaaaatccaactctctataactacctgatagcttaggtgtggtacttgcataataaagcattggctcacataattattgaagctgacaagtcccaacatctgctgccagctgaaagctggcaggcttgagacccaaaaagactgatgtttcagctcaagtccaaaggcatgaaaagaccactgttccagctcaagtagtcaggtaggagctccctcttactcagcctttttgttctattgaggtcttcagttgacaggctgaagcccacccacaccagggagggccacttgctttactcagtctaccaattcaaatgctcatctcagccagaaactccctcactgagacacccagaattgagtctgaccaaatatctgggcaccctgtggtacagttaaattgatacataaaatgaataatcacagtaggtaggtagctttgaatcttattttctatcaagtatcaaggatcaagcatataccaataatatttacaaagtttttttattgttgcagcatagatggattaaaaattaggattttgaaaaactgtttatataaagtatctaagggagaaattgtacactctaaaatactagaattctatgttagaattagtacctccgaagttacatacactaatatataaacaagtttatatatgacaaaggctaaaatttacccagggctcttaaaaataatgggttatatgctagattacatccttttcttgaagccatcataaagtagaccatatcaaaaactctcattagtatgagtagagtttatatttaccaatacatactttttccctcaactaacactccaacatttcttacaacagtaaaggcctggatacagcaacaatgtagatcatcttactttactcctttactccaaaaacccaataggaatgtatgttttaatcttgcaaaataccaatactagaccatttattaaatatatgctcctaatattcaccttcttacatttttactaaacctaatatttcttcacctttgaaaactttagagataacaaagtattatgattatagaaattaatcatttatagacaatttactataaatcttactttattttaaaattctgttgtaaacctcaccctttataaaaggcaagaaaagtgtttttacacaattacaaagatttctcctgtttttcaaatccagcagagtaaacacaagttaagaaattctacttccaaaggcctgctgacattactgattattgtcttgcattaacaaggaaatacctattagagcagcctactaagaccaacaacaaatagctggaggggaggtacttaatggaaacagtaactttttaaagaccctatgacttatccctgtttgacaccaaaaagaaataaaagataatgtatcatatctatatttctgggagattagtgtttcaacttgaaatttcagtgggtagttctgatagactattaggaagttctgtgaggagattttagtggcctcaaagaattgctttgtagcatattgaaacctgttaagcaccttctgaatatgaatgttcattttctaactcttttctcgaattttaagttagaaatggatgacttcttcataaggatcatgcacttgctgaatgttttaatatctgaatttagcaaaacccaaaacacatttggccaaagctgattttaagtcatttctcaaattttatacataggcataattcaaaagcaatttatttcatgtgttgcttctgattcatttacatttcacttttctcataaaaagtttattttataagagtttagttgttgtccaaaataccaaaataccttatgaaatttcgttttataacattttgaaacactcttattttgaagagagaaagttactataaaaacctgtgcctccaaattggtaatttggtttaaactgactctactctaagcaaaatatttccatactctcaattatcttttccttaacatttcttataactatagggccagatatagctacaatgtaactaaaagatctatatcacaatcactgtagcatttacaaaattatgttctgtggaacactagtgtgtcaagggattttaagaggtattcatgggcagaaagtggttaggggtggtagtcaaataagagtggaaaatgctgagttaaaatcaaacaggattgttcactacaaggtttctcagaacttgtatgtccaaaatgaatactcaagagcaagatacaggccaggtgcagtggctcacgcctgtaatcccagtacttcgggagggatcgcttgagcaggggagtttcaggggcagtgagctatgattgcaccactgcattctctcctgggcaacacagcaagaatctgcttcaaaaaaaaaaaaaaaaaaaaaaaaacagagagagagataggaagcaatgtttctcaaacttatttaacactgaaactcttaacaaaactcttaactgttgtaggtcattaatattctgtaaaaacaataatctgatcaatatgatctcaaacactaatgaggtgatttaatttactatcatccacctgccactgtcattgagataatctagttaacattttcaggaaagtgataccccaggtatttttaaagtactcctagttaagaaagaattactaataactccattttaatacaatagaaacaagttggaagtctgagttttgattaatataatgataacctgagagccatatggaaaatactatctaagtctaattcaccaggttttagagtagggtttttgaaaaaaaaaaaaaaaaaaagctggcaactattaaatttttggtgaattaaaagtataatacacagtcatttcttgattatgactttaacatttatttcttgagacagggtcttcctctgtcacccaggctggagtgcagcagtgccatcatggttcactgcaacctcaacctcctgggctcaagtgatcctcccacctcagcctcccaagtagctgggaccacaagcatgtaccaccacgcctggcttatttttgtattttttgtagagggggggttctgccatgttacctagactggtctccaactcctgaggtcaagtgatctgtccaccttggcctcccaaagtactcggattatagatgtgaacaactgcacctggcctgactataacatatttaattctatattggtttttccctaccactgagcacatttcatctctccttttttccctaccaagcacctggcatatgttcagtaaataaaaagtaatttaagtattagcgtaatcaagacataattttgacattgtcaagcatgcttgagggcagtgggccctctgctttgcttacagctgaggcttctgaaggcaaggacctcacggacatgtatttacataattgtaaggtcattctactgtgctataaagtcacacaatacattccaaagaccactggaaattaatttagaattatctaatgttttataccatgcatactatttcctgccttcaattataaagataactgagaacagtctctattaagaaatacactatgttttaaaaacaataaattatactataatgtgaaatactataactttgttaaaattcatatttttagcagaagtacaaaaaaaaacactgttactcttatggaacattaacaaaaatcttaaacagtttgacaaggactttcattttcacctataaaggattaactatgagaactgccttccaatcataaataacagaaaactgaataaaatatatgaaacaatagttttcagacactggataatagaaggaaaacaaactagctgagccctctgattgccccagcttatcacccagaagcattttccagactgcagagcagaatccacacagagcccagcagtcacagtgagctcaggagacagagacatggatctgggtaagctgatacaactagaatttgtggagattatcagacaggaggtagctaaatggaaagagaactctgaagatcttacagaaggtcttctgtaatctatggctgactattcatctgcatatgcataaagtgaaactcctcaaggctgaggaaagaaacatcaggaagcagtataccaaataatttccacagttcacatagagctaagaattaattctcatttgccagagtggagaggccatatagtacaggaggtatttgtagagttagcagtaaggctaacttagccataggctaaaggctgttctggaaccctttaacaaagcaaacaatgaaaggataaaactgaccccaagtaatttaaatgcatgccaaaaaaagtcccacacaccttaaaggaataaaacaaaacccagtacgcaacaacataaaattcataatatccagcatctgttcaaaaaaaaattacaaagcaagaaatattacccataatccaaagaaaacacaatcaatagaaacctagagaaaaagaaataaatagaatgacaagagaagtagaactggcagaaaaggacactaaaacaactatcataaatatgttcaagaatgcagtagaaaacatgaacatgttgaagaaataatgaagatatttttaaagatctactagaagtgagaattataaaatataaaatgaaaattacattggatcatataaacaacagaataaaagtggcagaatacaagatcagtgaacttaaatacatcaaaatagaagctacccagaacaaaacacaagtagaaaaagaccccccaaaatagtctcaggtacctgtacgaccatatcatgcagactaatatatatgtaactggagtcccagaaagaaaaggacaaagaaaaaaatatttgaaaaaaatcaccatggattttctaaattctgtaaaaataaataaataacagatgcaaatcagctcaagaaattctgagcagaataaacctgaaaaaaatccacatataataacatcataacataataataatatcataacatcataccaaaccacaacataatcaaacttctggaaatgagaaataaagagaatatcttaaaagcagccagagagcaggaaaaaaagacacattttgtgcagaagaataaaatcaagaatgatagaaaacttctcatcaaaaactaggtaagtcaaaagacaatggagtgacatctttaaagtactgaaacaaaaaacaaataaaaaaacacacgttctatacaggaaaaaatatatcttttaaaaaatgagggcaaaatacagaccttttccagacagacaaatactgagagaaattgatgctatcagactggcactacaagaaatgttaaagttcatcagcaaggataaaaattaaaccagaaagaaatataactctacacaaaaaagaaaaaagtaccagaaatggtaaatatgtgagtaaaaataaatgttttcctcatattttaatctttttaaaagataaaggtactgggtgcagtggctcatgcctataatctcagcactttgagaggtcgaggcaggattgcttgagcccaggagtttgagacaagcctgggcaatatggcaagacctcatccctactgaaaatcagtatttaaaaaattagctaggcattctggcatgtgactgtagtcccagctactcaggagcctgaggtagaaggatcccttgaacccaggaggtggaggctgtagtgagacatgattgcaccactgcacttcactccactccagcctggcaacagagggaaaccctgtctcataaaaagaagataaaataaaagaaaaagataaaggagattacccaaggcaaaagcaattacaaggtattgtaagcttttgtgatttaataaaaatatatttagtaagcttttgtgatataaagaaatatatttagtctctgccctcagttcctgagacagaactcctaaaacctttgcagctaggagtactagaaaaaacttttgatctaatacttggtcttttaccccagtttctgccacagacctcctaaaacctttgtaatttcctaagtgatagtagcatcttttgctctaacgaggtaactcttggcgggctcctgaatagcctcagaatggggactggttgccaggggagccaaccatgtgaatagaaggttggaacttttagctctaccctcagatctccggggatggggaaaggggttaaaagttgagttgatcaccaatggccaatgacttaatcaatcatgcctacatgatgaaacctccataacaatccctgaagtacagggttcagagagcttctgcactgctgaacacagaagtgcctggagggtggtgcaccctgagaggccatggaagctctatgcctcttcccacacaccttgtcctacacatctcttccaactggctgtttatctatatcctttgtaatatcctctataataaatatacccatttactgaagtagagtgtttccctgagttttgtaaggcactccaacaaattaatgaacccaaggatggggtcatgagaaccactgatttacagctggttagtcaaaagtgcaagtcacaacctggacttgtggctggcatctgaagtgaagtgaggtcttgtggttctgcctcttaacctgtgacaatccccacacacagtttgatgaccacaagtgaaatattcagcattctgttaaatatatgagaggaggaaaaaaagttttatctttttcttttaaagattcacaaaatatgaagaagtaaaatgtacgacactagcaacattgtaagattcttccccatatgtaaagttgtatgatattatgtaaagatagactgtgataagttaaagatgtgtgttttaaaccccagagcaatcactagtaaattaaaacaaagaggtatatggttaataagtcaacagaagagaagatgggacaaataggaaaaaaaagcaagataataaatttaaactcaaccataccaataacaacattagagactgccagatcggatttaaaatgaaggaaaaacaaaaaggaatagagaaacttactttaaacataaagacacaaataggttaaaagtaaaaagtgcaaatagatataccatataaatacgaattagaagaaagttggagagtatgtattaatatcagatgaggtagacttcagatcaaagaatattactagggatcatattaagtaacacacacatatacaaacacaaaggatcatctcaaaagacatagaaaaagcattttttctggaaatgtagttttaacttatgaaaaaaatcaatgtaaaatttaccatgttaactacacacacacgcacacacacacacacacacacacctgaaaagatgcagagaaagcatctgacaaaatccaacacctattcataataaaccctgaacaaactaggaatataaaggaacttcctcaaactaacattgaggaactgatgtcctacatatggaaaaaagactgaatgctatcaccctaagactaggaactaagcaaggacatatcctctagccacttctattcaacattgtactggaaatcctagagaaaaaaataataacaggcacacagattggaaaggaaataataaaactgtctttttgatagctggcatgattatttataattatttcaatgtaaggaatctacaaaaaagtaaaacagaaaacaacaacctaccaaactaataaatgagtttggcaaggtcatatgattcaaagtcaatgtacaaaaatcaattgtattgccatgttctaagaacaaataactggaaattataattcaaaagtcaatgcaatttacaatagcaaccaaaaaactggaaataattgggaataaatttaacaaactatgtaaaagatctgtacaatgaaaactataaaatgttgctgacaaacattaaagacatcccacatacatgaagagatgtactatgtttatggatcagaagatcccatactatttaaagatgttaattatcctcaagttaatctatagatttgataccattccagtaaaaatcctagtaagcctttttgtagaaactggcatgcttattctaaaatttaaatgaaaatacaaaataactagtacaactcaaataattttttacatttttaattttttttttttttaatagagaaagaaaagtgggcccagggaaccggcgttcagcatatggaggacccacgccggcaccggtctctgagttccctcagtatttattcattagtatctctaccatatcggagagggggacaacagggagacaatggagagtggcaggacaacagggtaatagtggggagagggtcagcaggaaaacgtgaacaaacatctctacatcataaacaaggtaaagaaaaaggtgctgtgcttttaatgtgcacatacataaacatctcaatgctttaaagagcactattgcctattgccgccagcatgtctcacctccagccctaaggcggttttctcctatctccagtagatggaatatacaatcgggttttacacccagacattctattgcccagggacgagcaggagacagatgccttcctcttatctcaactgcaaagaggccttcctcttttactaatcctcctcagcacagaccctttacgggtgtcgggctggggaacggtcaggtctttcccttcccacgaggccatatttcagattaccacatggggagaaaccttggacaatacctggctttcctaggcagaggtccctgcagccttccacagtgttttgtgtccccgggtacttgagattagggagtggtgatgacttttaacaagcatgctgccttcaagcatttgtttaacaaagcacatcctgcatagccctaaatccactaaaccttgagtcgtcacagcacgtgtttctgccagcacagggttaagggtagggttacagattaacagcatctcgaggcaaaataatttttcttagtacagaacaaaatggagtctcttatgtctacttctttctacatagacacagtaacagtctgatctctctttctcttccccacatttcccccttttctttttgacaaaaccaccattgtcatcatggcttgtcctcgatggtcgctgtctctttggagctgctaggtacacctgcacacaccgttgatacaatcatcaaagctgcaaacagcatgttctctgaagtttgtgtcacctttgtgttctctaggctttttttttttagctaactctgtcagcttctttaattgtgcccaagtcggtggctctgccttcttggtggatggcaacttcatctgttctgacatcaccattctattcatcttgtgagtcgatggtgctcaactgcggtgtctccatctccatggaggtgcttttctttgcatctctgatgggttcattgtacaacttcaaatatcgcaaggctgactgtagacatactcgggaatctctcgttaacttgtcctcagtgacgacgcttgagcgtaccttcaccctagagaaaagcacccacgttgggcaccaaatgaaggggtggccagcccctccacacctgtgggcatttctcatcaggtgaaatgaaagacatgaggaaagaaagagacacaaagtatagagaaagaaaagtgggcccaggggaccggcgctcagcatacagaggacccgcgctggccacatttttaatttttaaaggaatttttcaaatttcaaaataaattttgagaaaaaaattggaggacttaaagccatctgatttcagtacttaaactatcataaccaatatgatgtgatactggcttaaagaaatacctaagttaatggtacagaatagcactgaaaatacacttgtgatcaactgattttcaacaaatgtacaaatgcacaattagtagggaaaaagtggtgtctttaaaaaagagaacaagaagaactagacatccaccttttatagtgtaagataagcatataatgaaattatataaaaattcattcaaaatgtatcatagatttaaatataagagtagaaagtataaaactcccagaagaaaatatatgaggaaatatttgtgacttagagttaaattctaataagacacaaaagccataaaacaaaaaaccaaaaataagaaaactgcctttcactaaagtaaaaacttttgtttttcaaaaaaccgttaagaaaacaaaagcacaggccgggcgcagtggctcatgcctgtaatcccagtactttgggaggccgaggagagtggatcacttgaggtcaggagtttgagaccagcctggccaacatggtgaaaccccatctctactaaaaatacaaaaaaattagctgggtatggtggcgcatacctgtaatcccagctactcgggaggctgagacaagagaatcgcttgaacacaggaggcaaaggttgcagtgagccgagatcacaccattgcactccagcctgagcgacagagtgagacttcatctcaaaaaagaaaaaaaaagaaaataaaaaggcacaccacagagtgggagaaaatatttgcaaaagatgtatctgataaatgacttcggactcgtatccataatatatgagtccttacaactcaaaaataagacaataactcaattttttaaaatagacaagctttaaagcttatctattttaaatatctgaaatattcagatatttcagataattcaatatttgaaatattcaatatttgaaatattcaaatatctgaaatattcagatatttatccaaaaaagagatatacaagaaaataagcgcatgaaaacatgctcaatatcattattcattagaaaaatgccaattaaaactacaatgagatataactagtcataatatatccactaaagagactacaattaaaatattaataccaaatgataagactttgaggcaactgaactttcatacatcgctggtagaaatgtggcatatacaaccattaataaaatagtttgtttatttaaaattggtgaactttattttatgtaatttatacctcagtaaagctgagttttagaagttgacttgacaaaacatttttaaattagtaaaataaaatcctgataataccttgtaatagtttaacattttttaaatactagccaatcttttcccctaattgtccttagattcgtcatccatgcaaccagcagaaagcctcatactgtctcagaaaaggagtgacagtagaaagcagaagtaaggagtctttttcttgacccatgaatttcaaaatcctgggcctatcttctgagtggaaaggactcagaactacacttataacagccaggcaggtgaaaagggaatgtgggaactggagtaaggaaaccctacaaggagccactatgaagctccagctgattctaccatatgaaaatgctgcaagattgttttttacccaaaaagtatcctgaaaattcaaatttttatgtgaattttccaaaattttaaaatactgtccaaacaaaatcacttctgtgggtcaaattcagtccatcgatttgcaatacctggcatggaagacagattttggcaaacatctttaaaaaaaaaatttctcaccctccagacttgatgaaaacgccctggaatgaggataagaagatgcaaagaaacaactgatatagacattattcttgcaagagaacagagaaatctgtgtcccatttcttaggtacagactcaggaaggcagaaagataccacagaagaaatggatggataatatgtggggcaaagtattagccttatagagtttcccagaccccacgcagcaccgggaaggcttaaacaaatggcagtctcagggagttctccacattttagagtagtctgaggaccacagaaagaatataatgcaattaatagcatggaagttacagaaagagttgctttaccagataaaaacttgtcaatgagaatgatgagtcagcagcaacctgtgatgatcaactactacagaaataaaatgaaggacaacatttctacagatgccaccactcaccaccatgaaaagatgaagacaactagtacaacccactactctcacccaagaattatcagagcaccaggaaagtgaggcctctaattgacattaaaatttcagccacccaaaggacatgaacagacacttatcagaagacatacatgcagccaacaaacacatgaaaaaaaaatgttcaacatcactgatcattagagaaatgaaaatcaaaaccacagtgaggtaccatctcacaccagtcagaatgactattattaaaaagtcaaaaaacaacacatgctggtgaggttgtggagaaaaaggaacacttttacactgttggtgggagtgtaaattagtttgaccactgtggaagacagtgtggcaatacctcaaagacctagaggcagaactaccattcaacccagcagtcccattactgggtatatacccaaaggaatataaagcactctgttataaagatacatgcatgcatatgttcattgcagcacttttcacaatagcaaagacatgcaatcaacccaaatgcccatcaatgatagactggataaacaaaatgtggtacatatacaccatggaatactatgcagccataaaaaggaacgagatcatgtcctttgcaagacatggatggagctggaagccataatcttccacaaactaacagaggaacacaaatccaaataccacatgttctcacttataagtgggagctaaatgatgaacacatggacacattgacaggaacaacacatactggggattgtcagagggtgggatatgggaggagggagagcatcaggaagaacagctaatggatgctgagcttaatactgagatgatgggatgatctgtgcagcaaaccaccatggcacatgtttacctatgtaacaaacctacctattttgcacatattcccctgaacttaaaataaaagtgggaaattaaaaaaaaattcagtcacctgggaagaacaggggctcaaaatagaaactgagttacaaaaaaaataagaaaaagtataatccttgaacatctgatgttgtagagtgagatgtagttctacagactgctgtattaccttcaaagcaaagaggttctcaaaggaacatggaagcattttattttatttattttttagattaattatgccaaataaatattggatttttaaatatgcactacagatgggccaccaaagcacaacactttgaataactactacttaacggactatagaagtaggctcttctgatgacatctataataattttactagacaagctgagttactaaacacagtttttcagtttcccaaacccatttgtaggtaataaattatctatgacaagtctagatgattagtaacactggccaaaatgagtaaaacttactcattctgcaactatttaaacaagttcaataacaataccaccaaaatccactggtttgcattggggaaagtgttggtgtgaggcattaacagagaaagcaaagaaattagcacaaaatatgtatgtatgtgtatatgtgaaaaattgtattttctaatttttctaaaatgaccaatgatatggtttggctgtgtccccacccaaatctcatcttgaattgtaacccccacaattcccacatgtcatgggaggaacctggtgggaggtgattgagttatgggggcaggtctttcccaagctgttcttgtgatagtaagtctcacgagatctgatggtttttaaaatggggagtttcgctgcacaagctctcttctcttgtccaccaccatgtgagatgtgccttttaccctccaccatgattgtgaggtttccacagccatgtggaactgtgagtccattaaacttgtttttctttataaattatgcagtctttagtatgtctttattatcagcatgaaaatagaataatatagtaaattgtaccagtagagtggggtgctgctgtaaagatacccaaaaatgtgaaggcaactttggaactgggtaaccggcagaagttgggacagtttggagggttcaagagaagacaaaaaaatgtggaaaagtttgaaacttcctagagatttgttgaatggctctgacaaaaatgctgataatgatatggacaatgaaatccaggcatggtctcagatggagatgagcaacttgttgggaactggagtaaaggtgacccttgctatattttagcaaagagactggtggcatttagccactgccaccagatttgtagaactttgaacttgagggggatgatttagggtatctggcagaagaaatttctaagcagcaaaacattctaaaggtgacttcggtgctgttaaaagcattcagttttaaaagggaaacagagcacataagttcagaaaatttgcaacctgatgacatgatagaaaagaaaaccccattttctgaggagaaattcaagccagctgcagaaatttccataaataatgaggagccaaatgttaattgccaagataatggggaaaatgtctccaggccatgtcagagacctttgcggcagccccacccatcacaggcccagagacctaggaggaaaaaatggtttcatgggccatgcacagggcccccctgctgtatgccacctagggaattggtgccctgtgttccagccactctagccatggttaaaagggaccaaggtatagctcaggccatggcttcagagggtgaaagccctgagccttggcaacttccacatgatgttgaacctgtgggtacacagaagtaaagaactgaggtttggaaaccttcacctagatttcagaggatgtgtggaaatgcccggatgtccaggcagaagtttgctgtgaggtggggccctcatggagaacctctgcttgggcagtgtggaagggaaatgtggggttgaagcccccacagagagtccccactggggcactgcctagtggagctgtgagaagaggccatcatcctccaggccccagagtggtagatccaccgacagcttgcaccatgtgcctggaaaagctacagacactgaatgccagcccatgaaagcagccaggagggggcctgtaccctgtaaagccacaggggtggaactgcccaagaccatgggaacccactcttgcatcagcatgacctgaatgcaagacatggagtcaaaggagatcattttggagctttaagacttgactgccctgctggatttcagacttgcatgtggtctttagcccctttgtttcggccaatttctcccatttggaatgggtctattttcccaatgctggtacccccattggatctagaaagtaactaacttgcttttgattttacaggctcataggcagaagggacttgccttgtctcagatgagactttaaatggtggacttttgagttagtgctgaaatgagttaagactttgggagactgttgggaaggcatgattggttttgaaaagtgaagatgtgagatttcggaggggccagaggtggaatgatatggtttggctgtgtccccacccaaatctcatcttgaattgtaactcccacaatttcaacatatcatgggaggaacctggtagggggtgattgaattatggtggcaggtctttccatgctgttctcatgatactgaataagtctcaagagatctgatggttttaaaaaggggagtttcactgcacaagctctcttttcctgtctgctgccatgtgagatgtgccttttaccttcagccatgattaactgtgagtccattaaatgtctttcttttctaaattgcccagtcttgggtatgtctttatcagcagcatgaaaacggactaatacaaccacaaagccctttatttactagaaaattagaaaatgtgttttaaaatagatgttttcaattacccttctaatatagtcttagaaatttaacagcacatgattaaatttgattaagagttttttaagtattttaaaatcatgtgattaacagcacatgattaaatatgattaagaaccatatctacaatgttgcaattacctaagaattcaggcaaagaacctattttagtaggaatattcagataactaatcaagtacttgaagtagctatggcccaatagggcctctgagcttcaggtttttttctcctgaaaacggaaacaaatattcatgcagcctaacatttgcaaaaacatctagcagcacctgatacataagcccacaaaacaatatttactgaattggccaacatttacttccactcaacatcactgatgttggcctttgaaagaacaaatcaatgagaaattgctaggaaaagtcacctattccatcatggttctgcagtactcttccaaaggtaaaacagaccttcagtagtatcatctagcgcaagctgttcctgaataaccatctcccattcctacagtggtatttatattaataaatgctactgcatacctgcctaagaattctcctgacaccttgcagctttgctgcaaaagccaaaatagaaaaatgggatctaattaaactaaagagtttctgcacagcaaaagaaattatcatcagagtgaacatgcaacctacagaatgggagaaaatttttgcaatctactcacctgtcaaagggctaatatccagaatctacaaagaacttaaacaactttacaagaaaaaaacaaacaaccccattaaaaagtgggcaaaggatatgaacagacacttctcaaaagaagacatttatgcagccaacagacacatcaaaaaatgctcatgatcactggtcatcaaagaaatgcaaatcaaaaccacaatgagataccatctcatgccagttagaatggcgatcattaaaaagtcaggaaacaacagatgctggagaggatgtggagaaataggagtgttttacactgttggtgggagtgtaaattagttcaactattgtggaagacagtgtggcaattcctcaaggatctagaattagaaataccatttgacccagccatcccattactgggtatatacccaaaggattataaatcatgctgctataaagacacatgcacgtgtatgtttattgcagcactattcacaatagcaaagacttggaaccaacccaaatgccatcaatgatagactggattaagaaaatgtgacacatatacaacatggaatactatgcagccataaaaaaggatgagttcatgtcctttgcagggacatggatgaagctggaaaccatcattcccagcaaactatcacaagaatagaaaaccaaacactgcatgttctcacttataggtgggaactgaacattgagaacacttggacacaggaaggggaacatcacacatgggggcctgttgtggggtggggggttgggggagggttagcattaggagaaatgcctaatgtaaatgacgagttgatgggtgcagcaaaccaacatggcacatgtatacatatgtaacaaacctgcacgttgtgcacatgtaccctagaacttaaaagtataattaaaaaaaaaaagattgttactagctagaggaagctaggagggatggaagcaaaagagaggtcaaccctcagatggttgaggccttcgcaacagaatgaagacaatcttttctcattccacccattcttttttctcatcttccttcctctcatgtttcctccaataatatccacccacttttgccatctcttttcctcctcctcttttgcttccactgccataatttttttaatcacatactgccctcaaagaattcttttttttttttttcttgagacatggtctcgctctgtcacccaggcactggagtgcagtggcgcactcaatctcagctcattgcaacctccacctcctgggttcaagagattgtcctgcctcagccttccaagtcgctgggactaaaggcgcccaccaccacgcctggctaattttttatatttttagtagagacagggtttcaccatgttggccaggctagtcccaaactcctgacctgaagtgacccgcccacctcagcctcccaaagtgctgggattacaggtgtgagccaccacacccaacctagaattcctttgctattaatcagtagcctcagtaaaagacaagttctctattaagaaactgttaagagtagatctgatattcctttacatgtcaaaaagaacattgacatcatccacactatcaagtactcattatgaaggcaacagaatgaaacaaacaatcataaagccattctctttcacctcctacatcaggaatactgaatgctttggggcttcatctgattaaagtttcttcttttccttctccagaatatcccttttttggggggggggggggtggacggagtctcactgtggtgcccaggctggagtgtagtggcacaatctcagctctctgcaaactccacctcagaggttcaagagattctcctgcctcagcctctcaagcagctgggattacaggcgcctgccaccatgcctggataattttctgtagttttagtagagatgcagtttcaccacattggccaggctggtcttgaactcttgacctcaagtgatccatccgccttggcctcccaaagtgctccagaatatatcaatatcgtgaaaatgtccatattgcccaaagtaatttataaattcagtgttattcccatgaaactaccattgacattcttcacagaattagaaaaaaactcatatgatgcaggggttttcctcatcaccccttccagtttttatggccaagttcatcccagagaagacttgtatcattgaactatgccattcactcttcaattttccaaggcatcctctcctcatttttagcacccttttctaaggccctcatacttcttagcttcccaggaaccaccccacacataaatttgtctctctaagccttgccctcatcaggccagtgctccgttcagttgatttgactttaagtcccaactactgccatcaaaatgttatctgtttcgtgttctactatttcagtttcctcatctcaaataactattctgctaaacaaattcaatattctggtagaatcctttgttagataacaatttaaggatcagccaacagataattcttttttattattatactttaagttctagggtacatgtgtacaatgtgcaggtttgttacataggtatacatgtgccatgttggtttgctgcacccattaactcgtcatttatattaggtatttcccctaatgctatgccctgacaggccccggcatatggtgtttcctgccctgtgtccatgtgttcttattgttcaactcccacctatgagtgagaacatgcagtgtttggttttctgtccttgtgatagtttgctgagaatggtggtttccagcttcatccatgtccctgcaaaggacatgaactcattttttatggctgcatagtattccatggtgtatatgtgtcacattttcttaatccagtctatcattgatggacatttgggttggttccaagtctttgctattgtgaatagtgccgcaataaacatacacgtgcatgtgtctttatagcagcatgatttataatcctttgggtatatacccagtaatgggatggctgggtcaaatggtatttctagttctagatccttgaggaattgccacactgtcttccacaatggttgaactaatttacactcccaccaacagtgtaaaagcactatttctccacatgctctccagcatgttgtttcctgactttttaatgatcgccattctaactggcatgagatggtatctcattgtggttttgatttgcatttctctgatgaccagtgatcatgagcattttttgatgtgtctgttggctgcataaatgtcttcttttgagaagtgtctgttcatatcctttgcccactttttgatggggttgtttttttcttgtaaagttgtttaagttccttgtagattctggatattagccctttgacagatgagtagattgcaaaaattttctaccattctgtaggttgtctgttcactctgatgatagtttattttgctgtgcagaagctctttagtttaattagatcccgtttgtctattttggcttttgttgccattgcttttggtgttttagtcatgaagtctttgcccatgcctatgtcctgaatggtattgcctaggttttcttctagggtttttatggtgttaggtcttacatttaagtctttaatccatcttgagttaatttttgtataaggtgtaaggaagggatccagtttcagctttctacatatggctagccagttttcccagcaccatttattaagcagggaatcctttccccattgcttgtttttctcaggtttgtcaaagatcagatgattgtagatgtgtggtgttatttctgaggcctctgttctgttccactgatgtatatgtcaccaacagataattctttaacccaaaggaatgcttaacagggcttttttggctcattggtaaagatatttgtggaaaagcttatttttgatactctctaaattatagtcatttgagttgcttaatgatggggatatgtattgagaaatgtatcattaggtggtttcgtcattgtgtgaccatcgtggggtgtacttacacaaacctacagggtacagcctactacaaacctaggatatatggtatggcctattgtaggctacaaacccatagaacatgtaactgtacttaatactgtaagaaatcttaatgcaatggtatctgtgtatctaaatatatctaaacatagaaaaggttcattaatactaaggtattataatcttatgggaccaccatcctctatgtggtccatcattgactgaaacatcacgcagtgcattaccttacctaacaaaagcaaattatattctgtgtatacagagaacccggtcataggaaaaaccaactaaagctcagtaaacaatcacagtattaacagaacctctgtgtaggaaaagaccttgaagtttatctagtttgtaagttttcttaggctagaaaccagattatttatcttccacaacagcttgcaccatgccttccttgcacacagtaaatactcaagaaatacatgttgaatcaatagatacttgaacctctatctgatgcataaatctcctctagatttttccctattccctacatccacactccctgtcagttattgtggatatagctagcacagtagcagttctaagaccgaaggctgttaatatcaatgcaaaagggtgactatagatatttgactctccctaaccctcattaaagctatgccttcagtgacatatatttaatagaaaatgtgacaagtgcaaaatataacaactgtttatagtattagtacaacatatttatcaaaagtaaaggaatcagttcaaattgtggttagcagtctaatctgacttaaaacaagatacatcttccaaaagcattcatattctgaaaataactcatagccacaaaaggtaaatatttacaggacagaaatctagaacaatagtaatagcagaaaacttttctgctttttatttttaccaacttgatgttaatgaaatataacattgccatcagcataatacaataaacatgaaagggtacctaatatacttagaaattatggaaatcccaaataatgacagcaaaaacaaaaattatgtttttacttttcctttcatatgtcttttgtgttagtttgagagcatatgaccttgttatctacatactataataaaaaattgttagtgtgcctagatgcaggcattaaaaataactaaacaaaatcatatttctctgtgactaataaaagacccattgcacaggacccagttctcatctttctatgttggaagctgtactaaatgcagctaaccaagagaaaaatatctaaacaactctcagaagtagcatatctatatatatatatattacatctttgttgaaatctcaaatcttacattatctaaagatttgaatcacctttaaaacggtatttatgaaaattctaatctcctatcatgtttacttgtcctgtaagtggatatatcactcctagtaacatgcctgtgtctgacactactcatatagatgaaagcatacagtcattttagggattaacagaaaaacagacatttgcatggaacatttcccttattagatattatcatgttagcatatttttactatttctgattttactacaaaataaaatgagtttacttttacccttaagtttttctgtaatgtatattgccgataatacaaatactttaattgctcattagaaaaatctcattttactctaaaaattgccatagaaattagccctgaagagaacttataacacatacaaaaatcaagatatgactatgtcaaactggtatactagtttccatttataccaaattttacttttaaacattactttaaaagttaaagatatatttttgaaaatcccaggctagatcacatagtcattagaatgttatttggcctctttctaaattagtgccaaaatgaatcaattagacaagaatcaattagcaaaaaactatatactgatcaactgacttaacaactagccaaactgtatattcaaaaagccatccattcttctgtccgaaagtctcatttggggtgggcagaagtatgcattggcacttttctggaaagcaatttggtaagatatgttgtgttaatgttcattctctctgaccagtaattctactcctaagaattatcctaaggcaatattcagaaatgcaacaaagttttatgtataaagacgtgcattccaacattatttactggacaaggaaaaatatccaaacatcaaaaagagtttaattttttaaaaatgaatgcaatgcagccatttaaatcacaatatgaatagaatataataacctaataaaattttcagaaaatgtatataaaatatatgaaaaatttctgtagtaattacacctttggttacaggtgataacttacatttttcatatttttaggagtttataagactgctattcaagaataattgaattttttacactgaactagtataaacaaagattgttagaagccattttaatgagtgatagtcgtattgtatttcacatgcacagtaaagaaagaactgttggtcataagttgatgactgtaatcagctggctccttctgaagcaccatggacaatggtaaaggttccccggttaataattatcaataatcaaattaggagagcatttatgttaacaatttgtatttccatcaaaggtgaacttatttaaccaatagctgcgtatctcactagggacagttaatacaacaaaaccgcttgaaaaaggtatagaaccaatattcatttattgagtatgtaacaagtacaatctaaaccctttatttcatttaatccttacagtactatacagtatgtattattatccattttcagaggagggaactgaagctcagagagattagataacttatataagttcacaaagctggtaaatagtgttgctataatttgaacccagccttttcatatgcagaatccttaatgatatcaatgaaggaaattacactgtaatgatgagattgttcggcttgcataagataatgaacttgaaaatatttcaactgtaaagcattaaataaataattttgaaaagacaatcatgaatttgctgatcattaatagtttttgacagagtccacataattaagttaagagaaagacaaatgttttaattaatgttcaacaagataatgcctaatatcttgtgccaggaaatagtaggtgtgcaataaatacttgtgttattgaaccaaattaacttgatactgactaaaataaaaatagaaatatgtaaatatctcttagctactctccataagctacatgaatatactctcactcaagatataaaaaattaaatttgctaaatgattatacatatatgtaaaatatttaattgacatttcagactactaatcattaggtagaaaaatctgtgggttgtttttgggggtgaagagatattcacatatatacaaaaaaaacagaaatcacacacacagagtggtacatttagtacctaagcaaaccaacactatattgaataaaaatctagaatggataaaataattaagaatgtttccattttaactctgaaaatgtaataattaaaatttttaatctgaacattaccttccctttaaacaaagcattccagtgatatctaaaaatttcctattttggatatttgaaataatagctcctaatcatttaaataacctgctaaaatgctgttaaatcaaaattaaatgcctgttgttttgatttaaacatgacctgaacaatttttgcctatttttaccaatatataaaacatataccacctataccattaagatgattaaaccaagttaaggcccatgtgtcatgtaaatttccaaagttcaaatatttttgttgctgccaaatgcagcaagggtgggcttttccttgctattatttagtttacagtttaaattgctacagacaatcaaggaacaaattgggaataaaaacaatatgttactgatgcaccaagaaaaatgaacagatatggatactgtcagataaatgcactaaaatctgccatatataaggtaaaccagagtttctttctgagtaataaagatatgaattattcttttctgccaatatattctgttgatctttagcgatagaataaattaattctaaaatatttttatctaaaaatacttacagttcactcttacctacttaatcagtattgtcatcccaagggaaaatattaaatatacagaggtttctttggaagcctcccgttgcctcacaagtatataattagttacattccccacacactttttcctactccaagatttcaattattattaatgattaagttaactgaagttggtatcccctttcccatctgccaggcttatttgaggttttaatatacccttaaatatatatattatatatataaagtatgcttcaatatatatattgaagaatgctatagtatattcctaaagaccaaacacacacacacacatacacacacacactcaaatccctttttgagatacaaaggaattgagactatcccacagaacaacagactctggttgatattctggaaagtagaccttgcttagccactattcaaatttaaatagtggcacagcatagataacctactcatggatacttgagaaattaattagcaactctccaagatcatttatataatttgctttgagttcaaatgaaactagcttataaaaatatcagtatcctttatgtcttctttgtaaataattataaattatagaatttagattaataaacagagctaaaagataaattaaaactatattattattacttgatattattaaccagaacataattataaataaagcggaaaggattaactaaatcagttgagttaaacttataacacaaaatttatctcctctaatgtttcaataattatatttttcaggcactttgtatacaaaattgtcaatcttatcacatgtattactgtacaagatttgttaagatgaccaaattttaatcgatttagaaagtaaaaaaggcttaagaaaaagaattgtatagtaattctaataacatgtcaataacttgtcacagttacttgctcaggttcatcttacccactgttagattcccagaaccaagtatactgcctataacagtacaatactcaataatattaaattgaagttacatctttcagcaggctgtaccaaaattattttttaagaatgtcttagtccattcaggctgctataacagaataccataggctagatggcttataagcaacagaaacttacttcttacagctctggaggctgggaagtctaagatcgaggaactaacagatccagtgcctggtgagggcctgcttcctaactcatagatgggtgtctacttattcgttgtcttcacatgacagaaggggcaaagcagttctcttggggtgtatttttataatggcactaataccattcatgagggctcctatgacctaatctccctaccctaatcatgactctcatgacttaattacctgctaaaggccaagccaatacattggagattaggtttcaacatacaaatttggggagaacatagacattcagtctatagcaaagatgatttcccggccaggtgcggtggctcacgcctgtaaatcccagcactttgggtggccgaggcaggcagatcacaaggtcaggagatcgagaccatcctggctaacacggtgaaaccccgtctctactaaaaatacaaaaattagccaggcatggccgtgtgtgcctgtagtcccagctgctggggaggctgaggcaggagaatggcgtgaacctgggaggcggagcttgcagtgagccgagattgtgccactgcactccagcctgggcaacagagcgagactccatctcaaaaaaaaaaaaaaaaaagatgatttcccatcctgaaaattttagtgtgtgtatgcctatgtggatttttctgagacaaagatccgtacctgtcatcagggactcaaaggactatatgatccaaaaagttaaaagctatggacctgcacaaaatatggatggctgaacacaggccgtgtcttttaaacacacagcagaaagcacctctagaaatagatgagaagaggaaggaaagtcaactctagaaaaaaaacaaaggaattttgttgcttttcttcacctgtttgtttgttgcctttgttattctgcctacattaaccagaattagcagattactacaattcttcatttgatttcagtggaacaaatgcagccactgatagaattacagtacagcacaccctagaagggaacacaactgctttcattaagttaaatgtacctatagtaggatgaacaagtatcttactagataattcctttcgaatctagagcttagcttattaaatattcctgtcattaatttttgtcataatcatttgctccaactcagtaaaacagttgctaaaactcatatgatgaaagaaagctagatttcacattaattgcccctttcagtatcacttaattttcttcctttaattttgagcacacctgttttgaaggtgagcaccatacagccttgaccccccacgttcactgtatgtacttcatgccagtaactaaaatgctataattccacatcattaaattaagcaatagccaagtttcagattttacactgtctgactactaaaatcacattagttcactactagagtttagtcactgtatcaactattggtattaaatctttgaatgcaatgaaagttaacaatgctatttttatgttgtgccaaaaaaatcattcagtctgttttctctttttgattacagttcatttaagggaaaaatgttgctgtatggtttgacaatgttttgtgtgtcttcgactgatagaacacacaaaacgcttgaataggcccatttatttgagcagacatattaaataatactttaaatgtgaacatgcatgtcataaattttgtagtctctttaaagtaggataaatctggtatttaaagtagcctttgttcaaagccatctttttttctaacagtcataaagggactctgatttgtgctgcatgaacaatgccagcatcatcattttaatgttatccatatgggcttctaataatagataagagtctacatttgtattatatgtcttagagacatttaaaatctagataaggaaaggctgaattcattggccccacagttaaaggaaagcagaccctaattaaaagaattctgttctgaattaactagtttgacatgtgctaattgacagttcctgtgaaatggttctaattaaagtcaatatgtctttttcaattaaaaggaaattaagaatatactaatatacattaacaacttaatctgccttcaatatcccatacatcagctgcttttccttcctaacgttattggagaaccatctgacatgaatcatctactgtttgcttatggtatctcattattacttcacacgagcacagcagtagtaggtatccccttgaggaagaagataacctgcacatgctttgatttttcagaactcctaactcttagttcattaactataaaccacctttttgaattggaaaaaaaaaatggacatttcttaataagaatctttgctaaatgaaaacaaagacaagtgttctcaattagttggtctttttactataggccttagaggtaattgcattctgctggaaagaaggctgcactaagttttcatcatttggtttgattcaaaccaaagcttgatttgagcaacataaaacaaaaacatctttcaaatcatgttctgtttcccaagtgaaacttcggggaaatatcaggtgggaatactttgcattgtatatataacaggaaatagaaagcaagattgcttaaatgtctgcactaacagaaggcccatgtatacaatgaaaatgtagcattagagaagctgtttatagcaacataattaaatattcaaatgtacattaccaaagctatggtgttagcaatttcagttccagagaaagtaatattaaactgaaacatcaatgctaatgtacacaacattaacatcacatggagaacaatgaaaaagattaaaactatttgtttcttagtagatgattaaaatttagacattttaattacaataaaagggtttttcaaggaaagtttttacactatcaagatactatatgcaatttttcatgatatagctaatattttgataagcattccatcacaaccccctttctgcagtttagaattcaacatgaaatgtaacaacttatataaataggaaattattttacttattttcaccaaaattcatatttaatttagatcaagaaaaaaggtaaacaagtctcttccactttgccacttttattcactcacatctttaaaagatgaaatttgctatcacctgtagcattctgaggagcaatgagagagagaggcagctagccagccagccaatacaatctctcattgaaagcatttttccccaaatgtactctattattctttctgagtagttaccaaaaactttaatgaaaatcatcttaagtggaactcaaaaagcatctgaagtctagtgaatttccagaatgagtaaacacatattaatctactttcaataaagtgccttctcataattataaatataatcagactcaacagtcaaaatgcagtgctatgtattaccatgtggagcccctagtttgatttccaatcctgggacttgctcctcaagctggcatagactggaaatgctgcaataacagcatgtactcagcttttttaaatgggaaagaagccaatgcagcaacttttctgcccaattaaagagcattgtctatagcaggcctacacaacataaggcctgcagactgcacacagccatgaagcaattgttcatgacccacccacagatttgggaagggggagtaagtagaaagacatacaatatggaatctatgtcagcaataagagaaaagactgttccacagactccacctctcagttcacatgttacaatgacaatgctaatctcaggatggcaatcaacatgatctgtcaatcctcccaatgaagacatccactgtatcaatgctgcacttgtataaaaacttactaaagggcaggttttttgttgttttttgtttgtttgttttttgtttgttttgagacagtcttgctctgtcatccaggctggagtacggtggcacgatctcggctcactgcaaccttcgcatcccagattcgagcaattatcctgcttcagcctcctgagtagctgagattacaggtgtgtgccaccacgcctggctaatttttgtatttttagtagagatggggtttcaccatgttggtcaggctggtctcaaactcctgaccttgtgatccactcacctcagcctaccaaagtgctggaattataggtgtgagccaccgcgcccagccaaaggagcagttttatatactgaactgaaaataggaaaatcctgtagcattcatctgaaggtttatactatttgaacagtttataaatatttattgatgatcctcatgttttatattttcttatagaaacttgttttcatttctttctcttgttcctcccattcaattaccaatgagtgactatataactcattcaaactggaaagcttttaagaatgaacgtggaggaaagtgatgtcatggaagacagtagagtaggatcaatccctttaccaaaacaacagttgagttgacacgaactgtcataaccaactacttcagaactcaagtctagctgaacatttgcagtgtctagaggagtgcttgatgaagaaagagactagtaaattttggtgaatttcagtgttatgtataacaactactatccttaagccctgtggaaagcagcatggggacaatggcctgtatgcctggtgcaatttgctggtgccagagtgaacaacaggaaccttctcttgaaaaaaaaattgggtttctgtattttgatccgtttggaagttcactgaggggccagtacagagatggttcaaccatgatgggctgacgcagcttcccaggcatcagctgaaggaaattaaaaagaatatgctttacttttcttctcttacaaaatccaggcatttaagaaaaatctctgtcagtgtgctgactgaccatgaagataacaaaacataggcttctggaaccacacataacaaggaatatagttttttcaaaacaatttggaaaagtcactaaacaaatgaacaactgctgccttcatcaaacaacaacaacaacccttcatgtagaaggcagaatttgatttccaaaattgccacattacggtattcaaaatgtccagttctcaacaaaaaattatgaagcacacaaaaaatagaaagtatgacccattcatgggggaaaaaaatgataaagaccattcctgaggaagcccagatgttgaatttactaagcaaagactttaaattaactggcttaaagatgctcaaagaattaaaggaaaccatgagtaaataagtaaatgacattaggcaaactatatataaaagagtaagaaatatcaataaaggaatagaaattatttttttttaaaaagaacacagtagaaataatggagatgaaaaatataagagattaaattaaaaattcagaagaggggctcaggcaaaagaaatgtttatcaaacttgaagacagaacaattatacttacccagtcttatgaacagacaaaaaaaattaatgaagcaaaataaacagagtctacaggacttataggacatcatcaagtgcaccaacatacacattatgggttacagaaacagaaaagagagaaatgaagaaacattatccaaaaacttccaaaatttgatgaaagatgtgatgctacacatccaggaatctcaacaaactccaagcaagacaaactcaatgagatccacacaaagacacattataatcaaactgctgatagacaaagacagagaaaaatcttgaaatcagcaagagagaagggatttatcacatacaagccatcctcaataagattaacaacctatttttatgagaaactatggaggtcaaaagggagtggaataaaatatttaaaatacagaaagggaaaaaatgccaacaaggaatttatatacagcaaaatacttcaaaaatgaagaggaaattaagacactgccagataaaagttcactgacagacttgctctacaagaaatgttaaaggaattcttcaggctgaaataaaatgatactaaacagtaacttaaagccatacaatgaaataaaagtcactgataaggtaactacataggtaaatgtaaaacctagtattaatgtattttgggcatgtaatttcccttttcatttcctgtatgatttaaaacacaaatgcataaaacaataattataaatatatgtcaatgggcacataatgcataaagatacaatttgtgacagtaacaacataaagggaagaatgcagctgagtaggagcagaattaatgtatgctgctgaagttaagaactagattgctataaatttagaatattaactgtaatcccccatggtaaccactaagaaaataatttaaaatatattgaaaaggaaatgaagaggatgtcaaaatattattctaaaaaatccaatcaaacacaaaggaggcaatattggagaaattgagaaacaaaaaagacatgatatatagaaaataaatagcaaaatggcaaaaataagttcttcatgatcagttggcactataagcgtaaatgaattaaacaaattaaaaaacagagattgtagaaaaaattttttaaaaacatgatccagctagttgctgcttaaaagagaccaattttagacccaaagatataataagttaacaatgaaaggatagaaaaaaatattccatgcaaataataaccaaaagagagccaggctggctatactgatatcaggaaaaaaatggattttacatcaaaaactattgcaaaagacaaagaaatacattttataaggataaaaggatccattcatcaatatgatataacaattataaatgtatacacatcaaactagagagcctgagaatatataaagtaaatagtgacaaaactgaagagagaaaacaggctagaagacaggacaattatataattaggataataattggaaactctagaataatagttggaaacttcaatagcccacttttagtaatggatagaacacacagaaaataaataaggaaatagacaatttgaacaacactataaagcaacaaggcctaacagacatatacagaacactctaccaaaaatggaagaatatgtattcttctcaagttcacatgaaacattctccagaataaaccataatttaggccataacacaattttcaatcgacttcaaaatatataaatcacaccaagtatcttctacaacaacaatgaaatgaagctagaaataaataaaagaaggaaaactagaaacttttcaagttcacagaaattaaataacatattctttaaaaaaaataggttaagaaagaaatcactagaaaaacagaaaaatactttcagataaaatgcaaatgaaagcacaacataccaaaatgtataggaggcagcaaaagcagtatccaggggaaatttttatagctgtaaacacctatatttttaataaatctcaaattaacaacctaattttacaccttaagaaactagaaaaataagtgcaaattacacccaaaacaagcaaaataaataataaagattagagaaaagataaaacagaaaggagaaaaactatagagaaaaatcaataggaacaaaaaaaaatggtttgttgataaaaatcaactgtagaaattatcggggtggctagcaagatggccaaataggaaaagctctggtctacagctcccagtgagactaacacaggaggcaggtgatttatgcattttcaactgaggtacctgactcatctcattgggacaggttagacggtgggtgcagcctgcagaggatgagccgaagcaggtggggcatcacctcacccaggaagtgcaaggggtcggtgaactccctcccctagccaagggaagctgtgagggactgtgccatgaggaacagtgcactccaactcagacactatgcttttcccacggtcttcataacccacagaccaggagattccctccagtgcctatatcaccagggccctggatttcaagcacaaaactgggcggccatttgggcagacaccgagctaactacaggagttttttttttataccccagtggagcctggaatgacagcaaggcagaaccattcactcccttgtaaaggcggctaaagccagaaagccaagtggtctagctcagcagaccccagccccatggagccaagcaatctaagatcaaccggcttgaaattctcactgcaagcacagcagtctgaagtcaacctgggacgctctagcttggtggagggagaggcgtccaccattactgaggcttgagtaggctcttttcccctcacagtgtaaacaaagcctctgggaagttccaactgggcagagcccactgcagcatggcaaagccactgtagccagactgcctttctagatttcccctctctgggcagggcatctctgaaagaaaggcagcagacccaatcaggggattatcaaactcccatctcgctgggacagagcacctaggggaaggggcagctgtgggtgcagcttcagcagacttaaacgttcctgcctgctggctctgaagagagcaacagctctcctagcacagcgctcgatctctgctaagggacagactgcctcctcaagttggtccctgacccccatgcctcctgactgggagatatctcccagcaagggtcgacagacacctcatacaggagcgctctggctgggatatggtggaagcccctctgggacaaagcttccagaggaaggaaaaggcagcaatctttgctgttctgaagcctctgctggtgatccaggcaaacagggtctgaagcagacctccaacaaactccagcagacctgcagcagaggggcctaactattagaaggaaaactaacaaacagaaaggaatagcatcaacatcaacaaaaaggatgtccacacagaaaccccatccgaaggtcaccaacatcaaagaccaacagcagataaattcatgaagataaggaaaaaacagcacaaaaaagctgaaaattccaaaaaccagaacgcctcttctcctccaaaggatcactactcctcaccagcaagggaacaaaactggactgaggatgagtctgaagaactgacagaagtagacttcagaaggagggtaataacaaactcctctgagctaaaggagcctgctctaacccaatgcaaggaagctaagaaccttgaaaaaaggttagacgaattgctaactagaataaccagtttagagaagaacataaatgacctgatggagctcaaaaacacagcataagaacttcgtgaagcttacacaattatcaatagccaagttgattaagcagaagaaaggatatcagagattgaagatcaactcaatgaaataaactgtgaagacatgattagagaaaaaagaataaaaagaaatgaacaaaacctccaagaaatatgggactatgtgaaaagaccaaacctatgtttgattggtgtacctgcaagtgatgaggagaatggaaccaagttggaaaacatgcttcaggatattatccatgagaacttccccaacctagcaagacaggccaacattcaaattcaggaaatacacagaacatcacaaagatactcctcgagaagagcaaccccaagacacataattgtcagattcaccaaggttgaaatgaaggaaacaatgttaagggcaaccagagagaaagatcgggttacccacaaagggaagcccatcagactaacagcggatctctctgcagaaaccctacaagccagaagagagtgggggccaatattcaacattcttaaagaaaagaattttccagccataatttcatatccagccaaactaagcttcataagcaaaggagaaataaaatcctttacagacaagcaaatgctgagagattttgtcaccaccaggcctgccttacaagagctcctgaaggaagcactaaacatggaaaggaaaaactggtaccagccaatataaaaacttaccaaatggtaaagaccattgacactatgaagaaactgcatcaactaacgagcaaaataaccacctagcatcataacgacagggtcaaattcacacagaacaatattaaccttatatgtaagcagactaaattcccctcttaaaagacacagactggcaaattggataaagagtcaagacccatcaatgtgctgtattcaggagacacatctcatgggcaaagacacacataggctcaaaataaagggatgcaggaatatttaccaagcaaatggaaagcaaaaaaaaaaaaaaaaaatgcaggggttgcaatcctagtctctgataaaacagactttaaaccaacaaagatcaaaagagacaaagaaagggcattgcatattggtgaaggaatcaatgcaacaagaagagttaactatcctaaatatatatgcacccaatacaggagtacctagatttgtaaagcaagttcttagatacctacaaagagacttagaatcccacacaataatactgggagactttaacaccccactgtcaatattagacagatcaacgagacagaaaattaacaaggatattcaagacttgaacccagctctggaccaagcagacctaatagacacctacagaactctccaccccaaatcaacagaatatacattcatctcagcaccacattgcacttattctaaaattgaccacataattggaagtaaaacattccacagcaaatgcaaaaaagtagaaatcataacagtcttccagaccacagtgcaatcaaattagaactcaggattaagaaactcactcaaaaccacacaactacatgaaaactgaacaacctgctgctgaatgactattcggtaaataacaaaattaaggcagaaataattaagttctttgaaaccaatgagaacaaagacacaacataccagaatctctgggacacagttgaagcagtgtttagagggaaatttatagcactaacgccctgaggagaaagcaggaaagatctaaaatcgacaccttaacaacacaattaaaagaactagagaagcaagagcaaacacattcaaaagctagcagaagaaaagaaataactaagatcagagcagaactgaaggagacagacacatgaaaaacccttcaaaaagtcaatgaattgactgtaaactagttcaaacattgtggaagtcaatgtggtgattcctcagggatctagaactagaaataccatttgacccagccatcccattactgggtatatacccaaaggactacaaatcatgctgctataaagacacatgcacacgtatgtttattgcggcattattcacaatagcaaagacttggaaccaacccaaatgtccaacaatgatagactggattaagaaaatgtggcacatatacaccatggaatactatgcagccataaaaaatgatgagttcatgtcctttgtagggacatggatgaaattggaaatcatcattctcagtaaactatcgcaagaacaaaaaaccaaacaccgcatattctcactcataggtgggaattgaacaatgagaacacatggacacaggaaggggaacatcacactctggggactgttgtggggtggggggaggggggagggatagcactgggagatatacctaatgctagatgacgagttagtgggtgcagcgcaccagcatggcacatgtatacatatgtaactaacctgcacattgtgcacatgtaccctaaaacttaaagtataataataataaattaattaatttttttaaaaaagtcagtgaatccaggagctgtttttttttaaatatcaacaaaacagactgctagccagactaatacagaagaaaagagagaagatcaaatatacacaataaaaaatgataaaggtgatatcaccactgatcccacagaaatacaaactaccatcagagaatactataaacacctctacgcaaataaactagaaaatctagaagaaatggataaattcctcgacacatacaccctcccaagactaaaccaggaagatgtcgaatccctgaagaaaccaataacaagttctgaaattgcagcaataattaatagcctaccaaccaaaacaaaagcccaggaccaaacagattcacagctgaattctaccagaggtacaaagagggactggtactattccttctgaaagtattccaaacaatagaaaaagagggactcctccctaactcattttatgatgccagcatcatcctgataccaaaacctggcagagacacaatacaaaaaagaaaatttcaggccaatatccctgatgaacatcaatgtgaaaatcctcaataaaataatggcaaaccgaatctagcagcacatcaaaaagcttatccaccacaataagttggcttcatccctgggatgcaaggctggttcaacatatgcaaatcaataaatgtaatccatcacatacacagaaccaatggcaaaaaccttatgattatctcaacagatgctgaaaaggcctttgataaaattcaacaccccttcacgctaaaaagtctcaataaactaggtactgatgggacgtatctcaaaataataagagctatttatgacaaacccacagccaatatcatactgaatgggcaaaagctggaagcattcccttggaaaatcggcacaagataaggataccctctctcaccactcctattcaacatagtattggaagttctggccgcagcaatcaagaaagagaaagaaataaagggtattcaaacaggaagagagaaaatcaaattgtctctgtttgcagatgacatgattgtatatttagaaaaccccattgtctcagcccagaatctcctcaagctgataagcaacttcagcaaagtctcaggatacaaaatcaatgtgcaaaaatcacaagcattcctatacaccaataatagacaaacagccaaatcatgagtgaactcccattcacaattgctactaagagaataaaatacctaggaatacaactgacaagggatgtaaaggacctcttcaaggagaactacaaaccactgctcaaggaaataagagaggacagaaacaaatggaaaaacattccatgctcatggataggaagaatcaatatcatgaaaatggccacaatgcccaaagtaatttatagattcaatgctatctccatcaagctaccattgactttcttcacagaattggaaaaaactactttaaacttgatatggaaccaaaaaagagcctgtatagccaacacaatcctaagcacaaagaaaaaagctggaagcatcatgctccctgacttcaaactatactacaaggctacagtattcaaaacagcatggtactggtaccaaaacatatatagaccaatggaacagaacagaggcctcagaaataagaccacacatctacaaccatctgatctttgacaaggttgacaaaaacaagcaatgtggaaaggattccctatttaataaatggtattgggaaaactggctagccacatgcagaaaactgaaactggaccccttccttacaccttacacaaaaattaactcaacatggattaaagacttaaatgtaagacctaaaaccataaaaaccctagaagaaaacctatgcaatatcattcaggacataggcatgggaaaagatttcatgactaaaatcaaaagtaatggcaacaaaagccaaatttgacaaatggaatctaattaaactaaagagcttctgcatagcaaaagaaactatcatcagagtaaacaggcaacctacagaatgggagaaaatttttgcaatctatccatctgatgaagggctaatatccagaatctacaaggaacttaaacaaatttacaagaaaaaaacaagcaaccccatcaaaaagtgggcaaagacttatgaacagacacttcttaaaagaagacatttatatgcagccaacaaacatgtgaagaaaagctcatcatcactggtcattagagaaatgcaaatcaaaactacaatgagataccaaccatctcacgccagttagaatggcaatcattaacatgtcaggagacaacagatgctggagagaatgtggagaaataggaaagcttttacactgctggtgggagtgtgaattagttcaaccattgtggaggacagtgtggcagttcctcaaggatctaaaaccagaaatatcatttgacccagcaatcccattactgggtatatacccaaagtattttaaatcattctaatataaagacacatgcacacatatgtttattgcagcattgttcacaatagcaaagacttagaaccaacccaaatgtccatcaatgatagactggataaagaaaatgtggcacatatacaccatggaatactatgcagccataaaaaaggatgagttcatgtcctttgcagtgacatggatgatgctggaaaccatcattctcagcaaactaacacaggaacagaaaaccaaacaccacatattctcactcataagtgggagttgaacaatgagaacacatggacacagtgggggaacatcacacagtggggcctgttggagggtggaggactatggaagggatagcattaggagaaatacctaatgtagatgacgggttaaagggtgcagcaaaccaccatggcaagtgtatgtaacaaacctgcatgttctgcacatgtatcacagaacttgagtataatttaaaaaaaaaaaaagaaattaccacagccaccctaaaccttcagcaaccaccaccctgatcagtcagcagccatcaacatctaggaaagaccctccaccggcaaaaagactacaacttgctaaagtctcagatgatcattagcattttttaggaggaaggtatttttaattaaggtatatatatatatatatttttaggcataatgctattgcacaaaatagactacagtataatgaaaacataacttttatatgtactgggaaatctaaaaatgtaagtgacttcctttattacggtggttcggtaccaaatctgcagtatttctgaggtatgcctgtatttgaagagctgactagagaaaagtttctgagaaacacaaagccacaatagaagtgagacagcctaatttaataaaattaaaagaaacctctaaaaagcactatgcctttgctcaaaaaagccatttgtttgctagtgtgagttctgataaagaccaaatcctgtctcaagtacatgtttggggcttgtgttgaagttctctaagggcagtttaaccgcggtaagagatcacatcttgcattccaatttgtattaattaatatacaattcttaaaatgatgggatagtcagatgtttggtctagatcttcccagttgctcgtgattttatgttcctgcaaatataatctgcactcttctgaaaaaggaaaatgaaagaggatgggtgactctcagtcaatccatgtgacttctggatgaggacctgtgaaatggagaaaattggatttccagaactggcccttccaccactcccttcagatccagattgagcatatgtgttacttggtgcaattattgttataaacatgattcttgcttgttaaataaatgaatagaatgttataaagatgattctagcttgttagttacagaaaactagacaatgtaaactgtacatgtataaataagttattgccctttaaatgtcaaataccccatttctccttctcttgttttttgagctttccctaattagacagactcatagttttcattaagaagttcagtaaataaatatttgggctatctactatgtgtaaactgtcacaaaaacttttagaaacaagccagaaatccatatggatgagaagaaagggaggtggtaatgacggtggtggtggtggtggtcatggtgatgatgggagtggtggtggtggtagtggtgataggggtagtggcggtggcagtggtggtggtcttggtaatggtggtgttgatggtcattgtggttatggtggcagtggtggtggtggtcatggtggtgatgggagtggtggtggtggtggtgatggtggtggtggcggtggcagtggtggtggtggtggtggtggttgttcctggtaatggtgttgatggtggttgtagtcatggtggtgatgggagtggtgctggtggtagtgatagcaatggtggtggtggttgttcctggtaatggtggcattgatggtggttgtagtcatgctggtgatgagagtggtggtggtagtcctggtaatggtggtatttatggtggttgtggttatggtagtggtggtggtggtggtgcagtggtggtggttgacttggtaatggtggtgttgatagtcattgtggttgtggtagtggtggtggtgatgggagtggtggtgatggtggtggtgggagtggtggtggtggtggtggttgttcctggtaatggtgttgacggtggttatagtcatggtggtgatgggagtggtggtggtggtagtgatagctgtggtggtggtggtggcggtggtggtcgttcctggtaatagtggtgttgatggtggttgtagtcatgctggtgatgagagtggtggtggtggtagtcccggtaatggtggtgtttatggtggttgtggttatggtagtggtggtggtggcagtggtggtggttgttcccggtaatggtggtattgatggaggttgtagttatggtggtagtggtggtcgtggtggtggtggtggtcatggtggtgataagagtggtagtgttggtggtggtagttgtcctggtaatggtggtattgatgaaggttgtggttatggtggtagtggtgatggtgggggggtggtggtgctggtggtggtggtgatggccgtggtcctagctaaagtgataacagaatgaagttctggaaaccaaaatttttttttaaatgaactgtaatgattaatttttttgtgtcacctttactgggctaagggattctcagatagctagaaaaacattattctgggtgtgtctgtgagagtgtgtccagaagagattagcattttaatcagttaacaaaggaaagaagatctgccctaatcaatatgggcaggtatcttccaatctactaaagacgcaaattgaagaaaaaggtgggagagcaaatgttctctctcttctcaagctaggacattcatcttctcctacccttggacatcaaggctcctggttcttgggccttcaaactccatgacttatactggtagcctccccagttctcaggcccttggcctcagacttggagttacaccatcagctccctggttctcaggccttcagactcttgactgaattgtaccacgggctttcttcgttatccagcatgcagacagtatattataggacctcttggcttccataatcacataagccaattcccataataaatctcctcttatccatctatatatatcctattggttctgtttctctggagaaccctgactaatacatcaactaaaccaacaaacttttagccccactgattataaaaaaagaaagatgaaaataactaaaatctgacaagaaagcagagatattagtattgacctttacagaaactaaaagaattataagagaatacttggaactatttacaccaacaaattaggtaatctagatgtatggacaaattcctagaaacacataaattatcaaaactgatttaagaagtaaaaaatcttaacagatctaaagaaaaaaccttaacagacagactcagtattcaaaaacctcccaacaaagaaaagtctgtgctacatggcttcactgtttgttttttgagctaattagatagactcacagttttcatcaagaagttcagtaaataaatacaccaaacacttaaataagaattaattctaccaaacactaaattctaccaaacactaaaataagaattaacaccattccttctcaaacttttccaataaagcaggagagggaacacttcctaacacattttgtgagatcagcattactctgatactaaagtcaaagacctcaaaagaaaactataactcaatatcccttattaacacagatgtaaaattctgcaacaaaatactggcaaaccaaatccaacagcatattttaaaaacacatacaccacgaccaaatgaagtgtaactcatgaatgcaagtgtggttgaacatatgaaaatcaattaatataatgcaccacattaaggggatggagtaacatattacatgattatctcaatacatgcagaaggagtatttgacaaaattctatatcatttcatgataaaaaaaaaaaacactcacaaactaggagagaaaagaatttctttaatacgataaagggcacttatgaaaaacccatagctaacattatgctcaatggtgaaagaatgaaagctttcccctaagatcaggaagaaaacatgatgcctgctttgaccactgctatttgacactgtactggaagttctaatcaaaggaatgattccagaaaaagaaataaaaggcatccaaatttatgacacctttagaagtacaaataaataaaactacttctatttgcagatgacaaaattccatagaatcaatccacaaaaaacctactagtgctaataagcaaattcagcaaacttgcagggtataagatcaacacacaaaaatcagttgtgttttatacagcagcaatgaacaaactgaaaaggaaattaaaaacaattccatttacaatagcacccaaaagaataaaatacccaggaatacatttaaccaaggaagtgaaagacatacactgtatgtcttttattgtgtaatacacaataaaacatcgctgaaagaaactttaaaagacctaaataagtgaaactatttcccatgttcatgaattgtaagacttaatattgttcagataacaatattacccaaatcaatctacagttcctcaaattcatatggaactgtacagaaccccaaatagccaaaacaatatttcaaaagtaacatatggttggaagactcaaaattcccaatttcaaaacttactacatagctaaaataacccaagcagtatggtattggcataataatagatatatagaacaacagaataaaactgagagtccagaaataaacccaaacatctatggtcaattgatttttgacaagggtgccaaggccattcaacagagaaagaagagtctcttcaacaaatgatgcaggaacaaatgtataaccacaaacaataaagttggactcctacctcactccttattaaaagaaaaaaaaacctccaaatggatcaattacctaaatatgaaagctacaattataggactattaaagaaaccatacacttaaatcttcatgactttagatttggtaatggattcctaaactttcacaaaagaatgagcaataaaagtaaaaacagatatgttggacttcataaaaattaaaatatttgtgtatcaaaggatattacagaatgggaaaaaaattttgcaattatatctgataagaaattaatatcccttaaattatacctgataaaggattaatatgcagaatacataaagaaccattacaactcaacaacaaacagataagcaatccaaatttttaaatgggcaaaggagctgaataggcatttctccaaaagagatatatagatctctagtaagcacatgaaaagatgttcaacatcactggtcattaaggaaaatgcagaatgagatgccatttcacacccattaggatacctttaatcaaaaaaataaaaaatgttggcaagagccagccatagtggctcacgcctgtaatctgagcactattgggagggcactttgggatgatcacttgagcccagcagttcaagaccaccagcctggtcaacatgggaaactgtatctactaaaaatataaaaattaaccaggaatggtggtgtgtgcctgtaatccaaggctcaagaatcacttgaacccaggaggtgaaggttgcagtgagccaaaatcacgccactgcactccagcctgggcaccagagcaagactccatctcaaaagaagaaaaagttggcaacgatgtatagaaataagaaccctggtaacttcctggtaggcacgtaaaatggtgcagctgctgtggaaaacagtttggctgttcctcaaaaagttaaacacagaattaccatctgactaagagaaatgaaaagatgtccacacaaaaacttgcacatgaatgtttatagcagtattattcataacagcaaaaaagtgaaaacagctcaaatgcccatcagtggataatcagataaacaaattgtggtattggggtgtgtgtgtgtaagtgtgtcaaaaatatgccaagtgaaagaaagtagaacaacaggtcacatattgtatggttccatttatatgatatatccagaataagcaaatccatagcaatagacagcagattagcagataacaaacaagaaaaattccttctacatgacaaaaaaaatccaagatagaatcagcatttattatataaataactacttatacaatttggtgtggttttctttgattctttcaaacatcatgcattttgcaaataatgacattatacttacatggatttaagctaaaatctccatagggtttacatacatgtggctgttcttttccgtactttattctgttttattttagtctcttgggtttacatacatgtggttgttcttttccatactttattctgttttattttagtctcttgtctgatgcttgatttttgtcttttctcattaagaaaaagaaagtagaattgtatgtccaaatctagcattaaattacaattcttttactgagaaaataagaccaagcacaaagggaaaatgcaaatagagagagaacctctccaaaattctaattaagctgcaagccataaaagtgtgcagtttccataatgaaacctaaatgtttacagatttttcatcaaaagacaaatgaccaggttttagccttgaccgtgtaatggagataagttaagaatctgaagataatacctactgttttactctatttggaaaaaaaaattggacctcaaagttttgaatctttaacataaatacatgtactttataaaattttaataaggtactatttatatatacaaacatgatttgtatatcatatacacaaatatgatgatttgtatatcatatacacaaatatgatgaagaggaaattatttcctcttaaaattagatgtccactaacatcactagttatcgcttattttagaaatgctctcgtcaaattttctgaatttatgctataactttaaaagcaggaaaaaaatgttttgtggatactacaaactaagtagaatgtatattctcaaaactgttatggaagatagatggtattattaccatacatacctatgatttgaacataaagagaaaactcaataccactatgatgtaatattagaaggaaaaaatgaattacctctccaagacttagtatctattcttccaatatcattgttagaggtcctacaagtaaataaaatcaaagtgaaatgtataagaaactttcaattcctttattcattcatagatcagatagtaatataaaataaacaaaaaacccacatttcatctacctttgtctgtatgtaaataattagcaaagtattctagctgcttacgtcttgctttgctcaagcaggcttgtctgtgagggaaagaaactgctgtgttgtcaatattagtgaaccacatcctataaactctagagtccagggaaaatatatattggcaagaagtctattcaaaaaatcagcatgtgagacacggcatagcttggcccttgtagaaggacacaccctctttttgtcagaattgcttctattcagggacttctgtcataatttccttctccctctaccatgtcttcttaccttggatattatgaaataggcatcctttttaatttatacattatgaaaactattttcactgttaaacaaataaacatgttttctacatctatttgttcatgagttgaaaacaaagaaatacaggtgtttccaatgtcttcctggctttgccatataaagtaactgctcccagccattcttaatttacataccacaatttttgtgattattttttctcttgttgctcttgttaattgatattcatatttggtatctcaaagcataacaacttttctcctgaatctaatccttttataggagtcagcattcttggatgtataataaagagacggtcacatctttgccagcaaaagaaagaatccatgcagctacacaggtcactttctaagtgtttgctttagcctcctttttactgtgaatacagaaaacatctgcattcaatggttccgactttcaataaggcagcctgcatgcagagaaagctgaatgagaagaaacccaaagactcaaacactgtccaaatgagtggacttctaaaatataaccctttctcaaatttttgtaatacattcagtaaaggccttttttttttcagttaattcctccatatgcttcagtgattagtagtaactttatcttgtcattcccatagactatgatagaaacaaaataacccaaaagctagctttctgattgagtttccataaatgcaatgtgaaggacgtgcatgaagaatgcggaagcaggaaatgacttggagagcaatggagatattacgctgtgtttgtttaagttgctgtgtgaaaggcaaatcttcccactcccctcatcaccacagctgtgattaaaactctggctggctgaaaccaaatataaggttgtgttctcttcacccagctgtcaatctttccattagctggtttacaggttgtgagaaaagacatgctccggttttcaacatgtggatgaaaggtcctactttggtaaattcaattagatggaaaattgagctttctgtcttaatttcaactcatcatggaacagtgacaactacaggacctggaattatctcgttgaaccctgttttttcttattagttgatgtatattttattgttgctacctataaattcatatttaagtttatatactatcctcaaagtatacttaatgtaataaatatgcataaacccaggttgatgtaactttgacacagatgacataataaatatatgaagaaaaacgatggcaaatgccatagcctgaaatatcagaagtcaaagttaagattctcattagctttcatgcattcctcatgttttcattaaacatgtccataaatgcctagaactgcatgaattcatcatcggaatcaagggtcaattataaaacatctcattttcaagtttgccaatcaatgcacagctttaaatagcacatataccgttttggcactgggttttctccatgctcttttataaaataaatgaagaagtattatgcctcaaagtttcttagagaataagtcttatggccaggcacagtggctcatgcctgtaatcccagcactttaggaggccaaggaaagagggttacttgaggccaggaatttgagaccagcctgggcaacacagtgagactcagtccctacaaaagaaataataaataaataaataaattttaaaacagaataagtcttacaaccaaaagataataataataataatatattttgggaggttctgaaaattaactttccttggaaccacttagtctaaagaaagatttaatagtctttcttgccttgttttttcctctagctaaaacattttatatgataaagctagcaaaaacaaataggaataaaattactatcagttttacctaaggaaacttaaaagtggccaatttttctcatacttttacaaaattcttacttctggctcaaagttgcaagtaaatgtgtcatcctcaaagaagaatttttctgaaagctaaactatgacttatacacttccaagctatttacttcatatcaatattgcttctatattcaaactcgcagaacagcacaaagaaaaaaatctagttgaaatttataaaatacaaaggttcctctatggcatcccaatactagatgcagtttcaatgaaacatctatactgcaaatagaggaggcacataaaagaaagcaacagggaagacacaagttagaagagaacacaagtaaaagaaacacaaaatcaaataggaataaatgtaactggataaaggctcttcagaggctgagaaactaccctgatctacgaatctgcaccagcatccacaaattgtacttaattttttctattttattaaaaagaatttatattcaccataatgttgtctaaaagccttgtaattatatgtattacccttatgaaagaagcactaagatcagttgacctaggttcctctacataaatttattttgatttagagaaaaaataaaaaggaaaagcaaggcagagaggagaaaaaaggatgagaatatgctattctattcagaataactgaataatactgtaaaataactattacagaaaatcagtaatcttttcatgtgaaagaaagggaaaagatttggtaagaaatgtcataattttaattataagatacatcctttaaaattgtttcaaatatgtgaatgtgtgtgtgttccttcagccaattaactacagaaaacggtgacacatgggtgacagaagtacaggcatatctcactttactgtgcttcactttactgagctttacagatactgcttttacaaactgaagatttgtggcaaccctgcatcgatcaagtctatcagcactatttttccaacagcatatgctcactttgtgtctctgggtcacaatttggtaattctcacaatatttccaactttttcattattactgtatctggtatggtgatctgtgatcagtgatctttgatgttactattgtcattgtttgaggcaccacggaccatgcccataagcaaacttaataaatgtacacattctgactgctccaccaaccagcagttcctctatctgtttctctctccttgggcctccctattcccagacacaacatattgaaattgggccaatgaataaccctacaatggcctctaaatattgcagtgaaaggaagagtctcacatctctcaccagacaggacaaaagctaggcctcttgtgccaaacagccaagttacgaatgtaaagtaaaagtttttgaaggaaattaaaagtgctactcctgtgaacacatgaatgataagaaagcaaaacagccttattgctgatgcagagaaagctttaggggcctggatagaagatcaaaccagctacagcattcccttaagccaaaacctaatccacatcaagaatccaattttcttcaattctatgaaggctaagagaggtgaagaagctgcgaaagaaagattgggagctagcagaggttggttcacgaggtttaacgaaagaagccatctccagaacaaaaaagcacaagatgaagcagcaagtgctgatgtagaagctgcagcaagttatccaaagatctagctaagatcactgacaaagatggctacaccaaacaacatattttcaatgtagatgaaacagccttcggttgaaagaagatgacacctaggctttcacagctatagaggagaggtcaatgcctgactttaaagcttcaaaggacaggctgactcttgctaggggctaatgcagctggtgactttaggttggagccaatgctcatttgctattccaaaacactggggcccttaagaattatgctaaatcttttgtgcctgtgctctataaatggaacaacaaaacttagatgacagtacatctgtttactgcatgttttactgaatattttaagcctttcaatgagacccattgctcaggggaaaaaaaaaaagattcctctcaaaatagtactgctcattaacaatgcacctgatcacccaagagctctgatggagatgacaaaaagattcacattgttttcttgactgctaatacaacatccattctgcagcccatagatcaaggagtaattttgactttcaagtcttactaaatttttttttcttgaaacagggtcttgctctgttgcccaggctggaatatgctggcacaatctcagctcactacaacctctgcctcccaggttcaagagattctagtgcctcaaagcctcctgagtagctgggactacaggtgtgtgccaccatgcccagcaaattttttgtattttttgtacagaactcctgtactcctgagctcaggcaatctgcctgcctcggcctcccaaagtgataggattacagtgtgagccacctgcgccctacctcaagtcttattaattaaaaaatacattttgtaaggccatacctgtcatagatagcgattcctctgatggatctgggcaaagtcaattgaaagccttctggaaaagatttctcattctagatgctattaaaacatccatgtttcataaaaggagatcaaaatatcaacatgagcaggagtttggaagaagttgattccaagcctcatggatgactgaggggttcaagatgtcagtggaagaaataactgcatgtatgacagaaatagcaaaagaactataattagaagtagagcctaaagatgtgactgaattgctgtaatcttacgataaaacttttaaaaatgaggagttgcttctcatgaatgagcaaagaaagtgagttgtttttttttttagtaaggtttttgttgttgttgttgttgttgttgttgtttgggggaatttttttttttttttgagacaggttcttgctctttcacccaggctggagtgcagtggtgcaatctgggctcacagcaacctccgtgtcctgggttcaagtgattctcctgcctcagcctcctgagtagctaggattacaggtgtccaccaccatacccagctaatttttgtatttttagtagagactgagtttcactatgttgtccaggctggtctcgaactcctgacctcaagtgatccacctgtctctgcctcccaaagtgctgagattacaggtatgagccaccataccctgccaaaagtggttttctgaaatagaatctacttctggtgaagatgctattatatgtacattgtatcattgttgtgaacaacaaagtatttgaaatattccataaacttagttgataaagcagcagcagggtttgagagaactaactccaattttgaaagaagttctattgtggcataaaatgctctcaaacagtgtcatatgctacagagaaatttttcatgaaagacagagtcaatcgatagggcaaacttcattgttgtcttattttttaaaaattgccacagcaaccccaaccttcagcaaccacaaccttgatcagtcaccagccatcaacactgaggaaagaccctctatcagcaaaaagactacaactcactgaaggctcagatgattgttagcaatttttaggaataatgtatttttaaattaaagtatgtaaactgtttttttagacataatgtttttctactgcacatatataaatagactgcagtatagtgtaaacataacttttatatgcactgggaaaccaaaaaatgtgtgagactcactttatcgcaatatccactttaatattacagtggtctggagctgaacttgcaatatctctgaggtatgtctgtaaacacatttgatctacttgcaacatgacagtgaactgcgctttctccaaacacagagaaatgctagaaaacatctaacccccaaaaaaggtatatagcttagaaatacccagggttcaacaaagaggtaacccaaagccaaagttacaagagtatatgcagacagcataacaacttaagaacatataacgtagaaactgaacctaggggccagtagctaaggttttaaggtccatctgtcaggacaggatatgtggtttggggcccatgtaagtagtgaagttagaatgaaataactgaggtacctgaataaaaggttcagatattcaaaagatggcttattccattgaaaagggatattaaaagcaaaaacaaaatatttactcactagcccaggagagcagtttttttgccagttctctgccaaaagctctgggtaggaaaaagttttctataaccaatcaaaccctaaagataggtttggggcccatggtatgatggtaatcccatgccagataagaaatagctgctagtaaggaattttatataatgttatagtgtaattgctaagaaatattatcaaatgaaaaaaactaggggctggacagtgtcaatagtatgcctgcatttatctaagaaaacaatacaaatttaattccattttaaaagcagacacaaaagaaagataaatcaaaagctaattacattgtttacctatgggaaaggagagaaaagggcaaagtgagaaggatagaaactagacttcaccaaatttacctcattttctagttttgactctgaaactataaaaatttctaacataattataaagcaaaactgaatcaagaatgttaaaaactattcccaaaatttgaaagtaaaatgaaataaactaacttatgtatcaagttgctagcttaaacatggagaacaattatttcaagtgacattaaacagagtaatttgattataaattctaagtgggatatacagcaagaaccaaaagaactgtaaaaaaattgtaaactgtttcccagtaaccatattgttagtaatagcattggtattgttacactgatattaaaatagagattaatttcattaatgttattatactaggaaccaagagttttagcgtaagagggaaaaaaacacaaacataaaaccaaaaatgttaagtaaaacttctataatcccaaattcgaaatagaaaagttttttagaacaaactgtttgcaatgttggccttgtgaacttggatttcgaagtgttgccaccagtcccagaactaataagagaggtcactgtgcctaaacagtttgtacaacgtggtttaaactaaacacctcctctctttctgagagtctggaattttgtatatgccaggcagaggatgcctagataagcagcctctaataaacatcctgggcacaaagtctccagtgagcttccctggtagacatttcacatgtgttgtcacaacttgttcctgagggaattaggttcatcctgtgtgactccatgagcagaggacttttcaaggcttgtggctggtttcctccagactttgctccatttgccttttccctttactggtattgctttgtatcctttgctataataaatcacacatgagcatggctatatgctgagtcctgtgagtcctcctagtgagtcactgaatctgggggttgtctaggaattcctaagacagtgggaaactttgcagactaataagctggtttcctcaacaaataaattgcacaagacaaaaaggaggaaaaaaaatcttgtaaagaaatttaataataaatttttaattctaattttttgtttcagttcctctaaatatggcaaatactgattggaacaaaaaattacaatttgttattcagaagccataaaattcaaaaaaagttaaataaattgcagatcattgttgtataagtccatgtcatttatactcttgaagtcatttaagcttaaaactgcactaagacttttggaatattctgtacaaacaaactaaatttgactaaagaagaatatagaaaacatgaacatattcaagatatcaaagaaattaattcagcagtcaaaaatatgatgaaaacctcagtcaaaagtttatagacaagtatcaccaaatcttaaagaaacaggtaacccctattttaagcatgatattccagagaataaaaaataggaaaagctatccagctcatcttataagactagggtattagtccattttcatgctgctgataaaggcatactcgagactgagaagaaaaagaattgaaagaattgaacttacagttccacatggctggggaggcctcagaatcacggtgggaggcaaaaggcacttcttacatggcagcagcaagagaaaatgaggaagaagcaaaagtggaaacccctgataaacccatcagatctcctgaaacttagtcactgtcatgagaatagcacaggaaagatcagcccccatgattcaattacctccccctgggtccctcccacaatacatgggaattctgggagatacaattcaagttgatatttgggtagggacacagccaaaccatatcatcctgcccctggtcccaccaaatctcatgttcttacatctcaaaaccaatcatgccttcccaacagtcctccaaagtcttaactcatttcagtattaacctaaaagtccacagtcgaaagtctcatctgagaccaggcaagtcccttccgcctataagcctgtaaaatcaagagcaatctagttacttcctaaatacaatgggggtacaggtattgggtaaatacagctgttccaaatgaaagaaattggccaaaacaaagtggttacagggcccatgcaagtccaaaatccagtagggcagtcaaattaaatgatctcctttgactccaggtctcacattcaggtcatgctgatgcaagaggtcggttcccatggtcttgggcagctccatccctgtggctttgcagggtatagcctcccttcccagctgctttcacaggctaatgttgcgtgtctgcagcttttccaggtgcatggtgaaagctgtcagtggtctaccattctggggtctggaagacggtgcccctcttctcacagctccactaggaaatgccccagtaggaactctctgtagggactccaaccccacatttcccttctgcactgccccagcagaggttctccatgagggccctgcccctgcagcaaacttttgtctgtgcatcctggagtttccacacatcttctgaaatccaggcagaggtttccaaacctcaattcttgacttctgtgcccttgcaggctcaataccactgggaagctgccaaggcttggggcttccaccctctgaagccacagcccaagctttacattggcccctttcagccatgactggagcggctgggacaaaaggcaccaagttcctaggctgcacacagcatggggaccctgggcctggccccaaaaccacatttttcttccgggcctccaggcttgtgatgggagggcctgctgtgaaggtctctgacatggcctagagacatggcctggagacattttccccacggtcttggggattaacattaggctccttgctacttatgcaaatttctgcagctggcttgaatttctcctcagaaaaatgggtttttcttttctactgcatcatgaggctactgaatcatcaggaacttttatgctctgtttcccttttaaaacagaatgcttttaacagcacccaagtcactttttgaatgctttgctgcttataaatttcttcttccagataccccaaatcatctctctcaagttcagagttccacaaatctctagggcaggggcaaaatgccaccagtctctttgctaaaacgtaacaagagtcacctttgctccagttcccaacaagtacctcatctccatctgagatcatctcagtctggaccttattgttcatatcactatcagcttcttttcaaagccattcaacaaatttctaggatgttccaaactttcccacattttcctatcttcttctgagccctccaaactgttccaatctctgcctgttacccatttccaaagtcgcttccacattttcaggtatcttttcagcaacaccccactctactggtacaaattgactgtattagtctattttcatgctgctgataaagatgtacccaagactgggaagaaaaagaggtttaattgaacttacagttccacatgactggggaggcctcagaatcatggcaggtggtgaaaggcatttcttacatggcagcagcaagataaaatgaggaacaagcaagcccatcatatttcgtgagacttagtctcgtgataaacccatcatatttcgtgagacttagtcactatcatgataatagcatgggaaggaccagcccccatgtttcaattagctcccccgggtccctcccagaacacatggggattctgggaaatacaattcaagttgagatttgggtggggacacagccaaaccatatcaactagtataatctcaacgtggcaaaaatggataagaaaagactataggcaggctcatttactaatagagatgaaaatattcaacataaattaatgaatttaattgatttagtcaagcaaagtgtgtccatctatatcatctaaatgtctatgtctacatacacatatctacttaactgtgtcataatcaagtaagatttatcccaggaattcaaggatagactgacattgctaaatttagtaatgtaatctgccatattaacagatttaggagaaaaaccataagatcatttcaaaagacacaggaaaaaaaattcaacatccatatattatattaagaaacttttagcaaactaagaatacaagaaaattctcttaacctgatatttaatagtaaaattttaaagcattctctttaaaatcagaaacaagataaaaatgtgtgttagtactgcttctagttaggcctatacaggaaatcctaaccagttttttgggatttggggttttttttgttttgttttgttttgttttgttttgttttgttttgtttggagacgaagtctcgctcttgttgcccaggctggagtgcaatggcacgatctcggctcactgcaacctctgcctcccaggttcaagcgactctcccacctcagccccccaagtagctgggattacaggtgcctgccaccatgcccagctaatttttgtatttttagtagacacgaggttttaccatgttggccaggctggtctcaaactcctgacctcaggtgatcagcctgcctcggccttccaaagtgctgggattacaggcatgaaacaccatgcccagcccctaaccagttttaaaagtataagaattgaaaaaataaaaattattatttacaaataacatgattatacagaagatccaagagaatctacaaactgtcaaaactaatgagacaattcaacaaggttactgggaataagatcaatatacaaaaaattaatagcattcctacacagaggcaatatccaagcataaatataataaaacatctcattccaatagaaacaaaatcataatgtacctagaatatatctaacaaaatctgactaaaacttctatggaggaaattctaaaactttaacatcaggcataaatggaaacttaaatgaatgggaacatataccatgttggtagatgaaaaaaattcagtttcataaaaatgtctgttctcactaaattatttctataaattcaattccactagaaattccatgaaggttgttaacagaacttgacaatgtgaccctataattcacatgtaaaagaaaagactgaaaataagatactttttaagaagatgaacaaggtggaacgatttatcctaacagccatcatcctattataaagctatgataatttagatggcataatattgtcatagagataaacaaatcaaccacacagaatagggaacccagaaacagaaccacgtatatatggcaatttggtactgaatattgttggtacgctatattagaaagttggcaatacaaatcattgaggaaacgaaaagttattttcataatgatactgagaaaattagttacatacggaaaaaaaattagaccatctcgcaaaataaactccaggtggatttttaaaacttaaggctagaaagcaaaattgtaacatttttagaagaaaaaatgaaaattaaccatatgacatcaaaataggaaaagctttcttaagacccaaaaaagtagaagccttaaagggaaaggccaaaaatatttacacagtaagttttgaaacctctataaatagatacatcacaaagtaaaaagataaaccacaaaatggtacaagtttacaatgcatatgaccaaacatgaatgattataaaaaaatgaaataaaaaagaaaaaggtaaaaacaaaagaaatgaaatgtaaatggacaataaacatacgaaaggttgttcatcctcactattagggaaatgcaaatgaaaataaaacaacatttcacattatattctaataatattaagtataagcaagtatatgaggaaaaggaaatcttacccactgctggtgaaacataaattggtattgctactttggggaatgactggctacatcaggcaaagttgataatgattacaaccaacaagcacacaccctaaagaaacttttacacacacctggcaaaggaacaaggataaaagtgttccttacagcattgttttaacatttaatacctagaaatagactaaacatctgtaaataagtgaataaataaaatgcagtacattcatataataaaacactgagaaaaggatactatgtgtatcactgtaggtaaatctcaaaaacagaatgctgagtaaaaaaacaagctccagaatgtgtacagcatgatatgatttatgttaagtttaagaatatgcaaacaatagtatacaccagaactctctgcaataatgaaaatggtcagtatctgcattgtctaatacagcagcctctagcgatatgtggatattaaagaatattaaacacttataatgtggctagtactccaaagaaactgaatgtgttttcttttaattaatttaaatagccacatgtggctatagcagataccatactggtagagcaggtatataaatttatgaatacataaatataaatacatacaatcaaatatataaagctggaggaagaatacataccaacttcaggaaagtggttatctctggagaagtaaaatgagacagaatgggatgtgaaggaactcaagagtctttatgaacacttatttctttacaacaaaaataaatataaagcaaacatgtcaaaatacttaacattgttaaatttggttaaaatattgttaatattggttagtctgctttttcagtatgtttgaaatttttccctatttaaaatttttaatatttcctattttaaatgttttattttcatttctttgaagcatttcctttttaaaatatttaaataactttttgaaagtaaactgtatttaaatctttatacctgtagagctaaacccaagagatcaactatcttatgtatagtctcgatgaatatgtaaaacattgagaaaataagaaactagagcaaaaaaaatgatacaatatgcttgtagagttcctaatttatgtgatgttttacaattaattttcaaagatccaaccaaaatatctaaaaatgtgttattttacttagattgtaaatagaatggagacaaacgtgaatttatcttacaggtaagttagaacgattaaaaatacattaaataaaatactgaaaatagcactggacccagggtcatggcagtttttattaactttctagtaccagtttatattaactttgtgtgttctatttatctaggtttcctcattcgtacaggctgaactaaagagtctctgatttcactgcaattcttttaagtttagaacttttaatcaagtttcatttattctttcaaatgcatatgtaataagttatttaggataatcattcctttgtatcaaagtgtcaaaactctgcacatctgaaatccatattcccttagtggcatctaactcctcctccttgcccatagaaaagacagaaaaagaaagaagaaagtaaatacatgatcggctagtcaatgatccatggttctcaaagaacctcatttttcaaaaatggaagcttttctactagctttttgtgacttttaatgggtcttataatcaacacataaaatcctccagctattttcttttagatatcccaagactctggagagaaaactgattctctatataagttgcatctttgctcacattaatgtttttaattcacaaaaatctaaaacatatattagccaggaacatcaattcattcagtgttctctccaagttatcatgcagccaaagaatgcggaagaattaggtctctctgtgctattcatccatacaactcttagttacatcactcagtgtatgacagaaatgccaagattggagaagtttgattgtttattattgttctaactgacctgcacaactgttattacataataaggctttgggttaaattattttggatggtggtataaatgacaggaaatggcagtaattctcttctacttgttaatttttttggcaaaattattgagacattcctgacctctatcacctttcataaaatatacatacaacttaaattcatgtgatgcttaattttatgtgtcaatttgaatggggccacagagtgctaagattaaacattgcttctgagtgtgtctgtgagggcatttctagatgagattagcatttgaatcagtagactcagtaaagtacattgccctccccaatgtggttggccatcatccaattaattgaaggcctgaataaaacaaaaggtgaaagaaggaagaattcacagctttctgcttcctgcctgcctgtttgagctagaacgtgggtcttctcctgctgctggactgggatttacaccatcagctcacctggttctcagtccttcagattcagaatcacgttacaccaccagctttcctaggtctctagcttgcaaggagcagatcacaggacttctctgctaattcctcagaataaatgttccttacagtcaggtgctacttaacaatatttaggtaatgatggatctcatatatgactgtggtctcaaaagattatatggaactgaaaaattccaattgcctagtgacactgtagccatcataatgtactacatacaattatgtacagcaggggtccccaaatcccaagccatggaccagtaccagtctgtcacctgttaggaactgggccgcaaagcaggaggttagcagctggcaagcaagctttatcacctgagctccacctcctgtcatatcagcagtagcattagattcttacaggagcacaaaccctattgtgaactatgcatgcgagggatctagactgcacactcctcatgagaatctaatgcctgattatctgaggtggaacagtttcatctcaaaaccatgccccatcatccctggtccacagaataattgtcttccacgtttaggtccctggtgccaaaaaggttggggaccactgatatatagtacatagtacttgataatgataataaatgactatgttactggcttatgtatcaactaatactagactttttattgttattttacagtgtgctccttcaggagcctcaggcaagtccttcaggagatattccaaaagaaggcattattatcatagaagatgacagctccatgcatgttattgcccttgaagagctcccagtgggacaagatgtgggatggaagacaacgatattgatgatcctaaccatgggtaggactaggctaatgtgtatttgtatcttagtttttaataaaaaagttttaacagtaaaaaaattaaaaataggggaaaagctcatagaataaggaaatgaatgacttttgtgcagctgtacaatgtgtttatgttttaagctaagtgttactgtgttttaagctgttattacaaaagagtcaaaatgtttttaaaaagtttataaagtaaaaacgttaatttatcaactttatttaaagtatttattaaaaaggttaatttatttttgaaggaagaaaagtatttctttataaatttagtatagcctaagtgtacagtgcttataaagtctacagtactatacagtaatgtccgaagttttcatattcactcaccactcactcactgactaacccagagcaacttccagtcctgcaagctccactcacagtaagtgccctatataggtgtaccattttttatcttttatgctgtatttttatcgtagtttttctatgttttgatacacaaataattaccattgtgttacaagtgtctacagtactaagcacattaacatgctgtttgtacactgtacaggtttgtagtctaggagcaacaggctaaaccatatagcttaggtgtgtagtaggctataccatgtaggtttgcgtaagtatactctatgctgttcacacaaggacaaagtcacctaatgacacatttttcaggaaatatccccatctttgagcaacacatgactgtatatcctgttggttctgtttctcttgagaactttcactaacacagttaacaaacgtttcctgtagacatacaagcagccaacaaacatatgaaaaattctcaacatcactaatcatcagagaaaggcaaatcaaaaccacagtgagatgccatctcatacaagtcagaatggcgattattgaagagtaaaaaaacaacagatgctggtgaggctgcagagaaaagggaatttttatacactgttagagaaaatgtaaattacttcagccactgtggaaagcagtttggagacttctcaaaaatcttaaaacagaattaccattgaacctagcaatcccattactgggtatatatccagaagaaaataaactgttctaccaaaaagacacatgtacttgtatgttcatcgcagcaccatccacaatatcaaagacatggaatcaacctagttacctaccaatagtgaattggataaagaaaatgtggtatatacataccatggaatactatgcagtcataaaaaagaagaaaatcaaatcctttgtaacaacatggaggtcattatcccaagtgaattaaggcaggaacagaaaaacaaacactatatattctcacttataagtgggagctaaacaatgggtactcatggacataaagacagcaacaatagacactgaggactaccagaggggagagagaaggcagggggcaaaagctgaaaagctaactactgggtactatgctcattacccggttgacaggatcaatcacatcccaaacctcagcatcatgcaataaacccaggtaacaaacttgcacatgtaaccctgaatctaaaataaaagatgaaattattctttaatgtctcctggaattaattagcttcccaacattaataaggcaatatttttcttactaaacataagtactatttttagcacatgggaagattcaagcttgtaaagtacaagggaacagaatcccccctacccaaaaaggaaaaagcattttatgtttcattaattctaattacaatagttgaccctcatgagaacaccataaaccaggatttgatagataggattacagtgtagttcagtatataattacaatgcagtctgaaacacaacttacctttcatgttctattatatattcaaagtcagcataacactgctggatgttaaatacaggactacttacaggaacacttgttttaagtccaagaattgagaggaaaaagagaaaaaaatttttcaattggtatttctagtaacacccaatgctgcatactccattccaactactaaacatgcaataaattgttactctttgataaacctaaatccaaatgaaaaaggaaacatgaatataagctacactatcctcatgattaaagcatacagctcaaagacatacatttttcttcctccagcttccaacctgccaaaggatttttacctccagcacccattaaacatgaaattcattcagggagctctatgagtgataaagtaaaagctgctgtcagaaagtctggccagtttcccctgcaaatctaggagaaagactgagagtatgtaagcgctgacattatttataaattacttgccattcagcaatcaataagaacttaagtattattaacatatctcttttatttcacttaagaaaagcattttagttggagcaattcttgctgatgcactgaatctgtacttgaggaaacagatctaatattatacaagagtataattaggaatcaaaaaggctaaccaattaattttttagaactttaagctgatatttaagctttgcttatgaaagaaatgaagaaaaggagaatattgttatttcatgaaaccaaaatatcctttttaaaaatgttttaaatttcttataagctctgtgattcaaacagtataaatagtccatgtaacaaagcaaaatttaaagtgaagttaatgggttccctctataaggttaaatttcaacaaaagtaaaaacatcaataagaaataatataaatttttaatgctttaatgcttccattgatatcttaagggaagaactttatttggcaagcttcttagttcccaaagtcatattttcctacttttcaagcaaagaaacactatatataataaagtgacatgtgtaaagagataatttagcatatggacttattccactgattttaagtgtatgaagtgaaactgtgggttttgttctctaatctttaacattatttttttaaattgatttcaaatcattctttattatatcaaaattgcttaagtttacctagctaattatgggtgggatagttactcctgaccataattgtatcaaaactcttacactagaaccctgtgatatataagatatctgtaataatgttatagattactaatggtagttctccacttcttttcatcattcaaatatgtaccatcattactttttctatttctctcaaatgtgagttctcataagatcacatacctctccttagtgtttatggctgttttaatttttaaacttaattttgaaattatttgattaacatctatctcttctactagactataagcaaggacagaaaccatgtctatttttacatttactttatcctcaacatctagcatagtgtctggcttggaatatgtgatcaataaatatgtgctaatcgatggataatattaacaataaatggtgattttttcccttcactttcagaaaatctttcctgtctgcagtataaattgggccttaataaatagatgattgaatagagataatgccagaagatctttctcacatgcagctgtacatccaagaaacataacatttttgtctcttttttatatcatttttacttatttatggttaaacataaggtaataaactgaaaacagagtacatcccttatcaatatctacaaccaatgaagacttcaaggatctgctgaaaaggtacatagtaagaacagaaattaataaccatgtaaccaacaaactgatggccaagttttcatagttaatatggtcaaatattggagcaaagacaatttgtgcctgacacaaataactgcgcaaaaaatgaatgaatgaagtcttctcctcaaaaggaactacttcttgttatgcctactgcagtatttttcaacatccagacaaaatgtgtatgtgcattttatatatactccacacaaacacacttacagagtgttttcaaaggaagtaaacaaggtcaaaaggtaagattacaagactctaacctgaagggaattttaaatataaggacaaacatgacctgaaatctatggcccatattaaacttctctctaatcctctgacaacagacaaaacagttgacctttctgaagtgttctcaccctttctaataaagagtatggttgatatctctcatattaatgtaaaaagaaataataataaataacttacatttgtactgtttttctttatatcccttcccattctaaagaaagtattttagatggtatattaaacagtactttataatttacaaggcacttccacataaattctcatttaagctacacaacaaccctataagttatataagtaagtataatactgttagccctattttacaaacgagaacattaatggccaaaaaagttaagtgaactgtcagagatacaaaactaataagcagaaaatccaagaccgtaacccagatgttctgactcttcatcttttcattgtaccacaaacagtaatgtaaagttagaggtatttaaaatacatagtggcaacaccaaatattaaactagcagtgtatttctgtgagtttagaaactaggacagaataatctgagtcttttatattatcagaaaagaaatatcactatttcatttggaatattacatttcttcttccaccatgcaatgcactagtcaacaataaatttactagaatggcacctattaaccagactcaaaaataaatctaacagcagattcactcaattacacagttaatacaaactattatatagtttttattgaagaataaagatattttcctgaatctctcactgataaaatgcaatcttatcaatcaattcacattattgttttatatatacttctcataaagtatgtttgtcttattatcatcttccctaaaactccagtaagatttttgtagttatcctcaggttcaaaatggaataagtaattgtttgatactttcttgctaagtctttaaagtactatacaactgctgatgtatgtttgtgctggcattgtagagtagagccttgggaatacaaaatctgatttcagagaaaccagaatttagttcaaataaaagagccactttctccagctgataagacttttcctgaaagaaaagcaccaagtaagaaacatgctggtgatatctcctgttagttctttacaatcctaatcaaaacttttttttaatttacttcattatatacttctcttttcacattttctcctgttagtttaatttttgttagttttatttgtttgttgtatgtctcagagtataatcacattatttcaatatacattgtattagatatttcagactaaaaaatataactatgtaattgcagaatatcctcaaagatctcattagaaagggaagcaaattttaaaagaatgaagtaggtacttttcttacagatttacaatgttactaagcaataataatcaggtaacaccatcagtcatatatgcatgccataaaactttaatgtaataactaatcacatttatttatattcttatcagaagagttgaatgatataaacaaattggccaccaatacttttatgccatattctagggaaaactgggttaaagtaggaagaatgagactatgtgggtgacctattacataccactttttgtagtttacaaacttgaataagtttcaactagaaggaaaaataagattaaaaaaaccattcattatctggatttcttttttcaaagagacaaggtcttgatatgttgcccaagctggccttgatcttggggcttaagcaatcctccctcctcagcctcttgagtaactagtactagaggcatgtgccactgtgcccaccttctctgagattttttgaattattattattcaaaagacctccacaatatattacaggcctaaaattacctttgaaatttaggctcatgagaacaagagtttttcaaaattgcttttatgataaatgttagtaatgtgatacagacctagtggtaagtagacctagtgtctccagacctgaggctgtgtagaaacagtagaatgaccaatgaactgctctttttcaatgttattagactgatggtcttacaattggtagtgtattggattactacaattctggctttatctttgtatggaaccttacagtttcaacgtattttcacaatgatgatttcactcaattctttcaataaccctttcagggagataagatccccattttacagataagaaagcagggactaagggattttccaaagatcatacaatttcagaaataagatatgaacccagattttttatttccaagatgatacatttgccttcatctgtacttcagtttctttatatttaaaatggtaacaattatatctatgtgacacagatataattacatttctcatttaatcttcaactatttagtatcaattatgacagataatactaaataatatgcattttgaaagcattttggtatttaagtatataaaaacaaaaccaccatttccacataatatagggtggtagcagtaaagaaactggtcaggtctgaaaggggactgatgtcaaagctgataatttcatccacagtattatgctccttcaggcttcctaagatgtacatctaagagatcatcatggtacagactggtgaagaaatttattaaagtagacttaaagtagattaacacagtctaccagactattaaaaatttttaattaaacacaataaaaatcactacacttaagtggcctctttctgagagattagaatctaaagtcagcacataagaaaaatttgcatatggtcaaaatcccttaaggcaatgtcatgttgaagactgacatactttctctcataccagttatctttttactttggttgtgtactagatgaattagttggcttgtatttcatactgtatataaaaaaaatacataactttaaaccctagaaacacactcagcctagcacacataaaagaactgagactgacaggaatagcagatttacatctcacattcattccagggcacacattcattgagcgaaatattttaacttctctttctttttggccaaatctttatatgcatatgtatttaagtaaagcaaatgtatgatatgactccactgtgtaaatcattaaaatagaaaacataaagatatatagccacactaatattcacatacgtgggaatatatctcaaataattgcccacactgcatgatgctgaaaggacccttaatttctatttctacactgtatgttttggtaataacttagttgtcagtgtatacataacccccatcaaagaatgtgaaagtatatataagtgtatattaaattttccaaaggatatttccaaaggacctctaaaacaatgcttctatttagacatgcatgttagaatcaccatgtctgctgctattgcccagtaattcttaatgtttaacaaaaagaaaaatatccaacttgattccaagaaatgtgtgatcttctacagaaaaaaaattctgcaacaactgctactacacattttcaacataacacttaaaatacaatatactgtgtttgaaaaattagacaaaataacatttaagaagtctaaactaaaagaaagaaattctagaatattactcatctatgatgactcagtataaactgacatttctcctagcagaggtttttaaaaatcctctctatttatggaaagacagttaagcatcacagtatctaaggtctcaatgttaagaatcagagagctttaaaaagacaaattcacattcactactattttcagtaatatatagatcctattaaattccatgtaaatcacataaatcaaagagaaaaatatgatctacctatttaaaaactgaactacacgcatacctattattgtaatagtttccacatgcttaaaactaaagtttgcttaaattttagtttttaatagtcaggattagttgtttacttttgcatctttgaagcctggaaatatatttgttttggttactctccacttttttgttaatgaacacttccatattgtgctctttttgaagaacaccaaatccacttcaaaaagctgtcaaatccacagtcccattttcacatactgacaatgctcaattactcaaagaaacattcctttaaaagtagactaatcactgaaattttaataagctcaaacaaaaaatatataattttattttattaatagtgtcctttttcactcaacaagaggaagtatacaggttttactgaatgaagaatgactttatctgaattagaaagtatttaatctaggaccagattttcaacctataaactccaggaaatttttcaagagaagtatggcctgttctcaagtagatttgtaccagatatggtagagactctaatgaatccaaataaattctcgtcttccatcaaaaacaaaacaaaggaaattatttaaatgagcaaaaggaaggtgatagacacagctgaaaaaacagaataatatagtactccccttctgtgaccatataaaatacagcttctacatattgcaagcctccccccaaagaaagctgtgatttttctatttctttgaccaaaataagaattaaaattacaaaatgaagcacttagaaacatcacaatacttcatcaataaacagatgagataatacttacattttacatgttgtattccctaaacacccactaagagtcaatggtatacaaaacaacatggtactggttcaaaaaaagtgcatagaccaatggaacagaacagagagcccagaagtaacgccacacacctatgaccatctgatattcgacaaagctgacaaaaacacgcaatggggaaaagactcgctattcaataaatgatgctgggataactggctagccatatgcagaagattgaagctggaccccttccttacaccacatacaaaaatcaacccaagatggattaaagatttaaatgtaaaactcaaaactataaaaatcctgtaagacaatctaggcaataccatcctggacataggaaagggcaaggattttatgacaaaaacaccaaaacacaaaattcaaaaattgacaaatggaatctaggtatacttaagagcttctgcacagcaaaagaaactatcaacagagcaaacagacaacctacagaatgggagaaaatatttgcaaactatgtacccaacagaggtctaatatccagcatctataaaaaacttaaacaaatttgcaagagaaaaacaaacaaccccattaaaaagtgggcaaaggacatgaacagacgcttttcaaaagaagacatacatgcagccaacaaacatatgaaaaaaagctcaagatcactgatcattagagaaatgcaaatcaaaaccacaatgagatcccatctcacaccagtcagcatggctattattaaaaagtcaggaaacaacaggtgctggtgaggttgtggagaaaagggaacacttatgcactattggtggaaatgtaaattagttcaaccattggaatgcagtatggcgattcctcaaacagctaaaagcctgccattcaacccagcaatcccattactgggtatatacctagaggaatataaagcattctaccatatagacacatgcatgtggctgttcattgcggcactattcacaatagcaaagacataaaatcaacctaaatgcccatcaataacaaattaaataaagaaaatgtggtacatatatatcatggaatactatgcagccataaaaaagaataagatcatatctttcacaggaacatggatggagctggatgttatgatccttagcaaacgaatgcaggaacaggaaacgaaataccacatgttctcacttttaagtgggacctaaatgataacttatgaacacaaagaagggaacaatagacactggggtctacctgagggtggagggtgggaggagtgagagaggcagaaaagataactattgggtattggacttaatatctgggtgatgaaataatctgtacaacaaacccctgtgacatgagttcacctatgtaacaaaccttcacaagtatccccgaacctaaaagttactttaaaaaaagagtcaatagtataaatgtgcaatgttccatactgtttgttgataaatttaaagaatgagggtattactaattcattcccttttttaaaaatacaacaattactaaaaatgaacagtatgatgggcaatttttattttccacttagtacaaacatagaatgtgaaatgaggtgggtggctggcaagatggccgaataggaagagctctggtcagcagctcccagcaagatcaacgcagaaggcgggtgacttctgcattttcaactgaggtatgcagctcatctcactgggactggttagacagtgggtgcagcccacagacggtgagccaaagcagggtgaggcattgcctcacccaggaactgcaaggggtcagggaactccctcccctagccaagggaagccatgagagactgacatgagggacggtgcattctggcccagatactatgcttttcccatggtctttgcaatctgcagaccagaagattcctttggctgccaacaccaccagggccctgggtttcaagcacaaacctgggcagccgtttgggcagacaccaagctagctgcaggaggttttttttttttcatatcccagtggtgcctggaacaccagtgagagagaactgttcactcccctggaaagggggctaaagccaggcagccaagtggtctatagcggatcccactcccatggagcccagcaagctaagatctactgacttgaaattgttgctctgccagcacagcagtatgaagtcgacctgggatgcttgagcttggtggggggaggggtgtctgccattactgaggattgagtaggcagttttcccctcacagtgtaaacaaagcctctgggaagttccaactggatggagcccaaggcagtacagcaaagccactgcagccagactgcccttctggattcctcctctctgggcagggcatctctgaaagaaaggcagcagtcccagtcaggggcttatacatcaaactcacatctccctgagacagaggacctgggggaagtggcagctgtgggtgcagcttcagcagacttaaacattcctgcctgccggctctgaagagagcagcggatctcccagcacaacccttgagctctgctaagaaacacactgcctcctcaagtgggtccctgaaccccatgcctcctgactgggagacaccattgggcagcagggttggacagacacctcataaagaagagctccagctgggatctggcaggtgcccctctgggacgaagcttccagaggaaagaacaggcagcaatctttgctgttctgcagcctctgctggtgatactcaagcaaacaggatctggaatagacatccagcaaactccagcagacctgtagcagagaagcctgactgttagaaggaaaattaacaaacagaaaggaatagcatgaacatcaacaaaacggacaaccacacaaaaactccatctgaaggtcaccaaaatccaagaccaaaggtagataaatccatgaaaataaggaaaagacagtgcaaaaaggctgaaaattccaaaaaacagaaagccacttctcctccaaaggatcacaactcctcaccaggaagggaacaaaactggacagagaatgagtttgaaaaattgacagaagtagacttcagaaggtgggtaataacaaactcccccgagctgaaggagcatcttctaacccaatgcaaggaagctaagaaccttgaaaaaaggtaagacgaattgctaactagaataaccagtttagagaagaacataaatgatctgatggagctcaaaaacacagcatgagaccttcgtgaagcatacacaagcatcaaaagccaaatcaatcaagcagaagaaagaatatcagagattgaagatcaacttaatgaaagaaagcatgaagacatgattagagaaaaaagaatgaaaaggaatgaacaaagcctccaagaaataggggactatgtgaatagaccaaacctgcgtttgattggtgtatctgaaagtgatgagcagaatggaaccaagttagaaaacacgtttcaggatattatccaggagaacttgtccaacctagcaagacaggccaacattcaaattcaggaaatacagagaacctcacaaagatattcctcgagaagaacaaccccaagacacacaatcatcagattcaccaaggctgaaatgaaagaaacaatgttaagggcagccagacagtaaggtcgggtcacctataaagggaagcccatcagacaaacagcagatctctctgcagaaaccctacaagccagaagagagtggggtccaatatgcaatactcttaaagaaaagaattttcaacccagaatttcacatccagccaaactaagcttcataagcgagggagaaataaaatcctttacagacaagcaaatgctgagagattttgtcaccaccaggccggccttacaagagctcctgaaggaagcactaaacatggtaaggaaaaaccaataccagccactgcaaaaacataccaaattgtaaagaccactgacactatgaagaaattgcacgaactaacaggcaaaataaccagctagcatcataacgacaggatcaaattcacatataataacaaggttaaccttaaatgtaaatggactaaatgccccaattaaaagacacagactggtaaattggatagagtcaagacccattggtgtgctgtattcaggagacccatctcatgtgaaaagacacacacaggctcaaaatagagggatggaggaatatttaccaagcaaatggaaagcaaaaaaaaagcaggggttacaatcctagtctctgataaaacagactttaaatcaacaaagatcaaaaaagacaaagaagggcattacataatggtaaaagagatcaatgcaacaagaagagctaactatactaaatatatatgcacccaataaaggagcacccagattcataaagcaagttcttagagacctacaaagagatgtacactcccacacaataatagcgggggactttaacaatccactgtcaatattagacggatcaacaagacagaaaattaacaagatattcaggacttgaactcagctctggataagtggacctaatagacatctacacaactctccaacccaaatcaacggaatataccttcttctcagcaccacattgcatttattctaaaattgaccacataattagaacaacattcctcagcaaatgcaaaagaacagaaaacataacaaatggtctctcagaccatagtgcaatctaattagaactcaggattaagaaactcactcaaaactgcacaactacatggaaactgaacaacctgctcctgaatgactactgagtaaataacaaaattaaggtagaaataaataagttcttagaaaccaatgagaacaaagagataacataccaaagactctgggacacagctaaagcagtgtttagagggaaatttatagcagtaaatggccacaggagaaagcaataaaggtctgaaatcaacaacttaacatcacaattaaaagaactagagaagcaagagcaaaaaaattcaaaagctataggaagacaagaagtaactaagatcagagcagaactgaaggagatagacacaaaaaaacccttcaaaaaatcaatgaatccaaaagctggatttcttaaatgattaacaaaatagatagactgctagccagactaacaaaggagaaaagagagaagaatcaaataaacacaataaaaaatgataaaggcaatatcaccactgatcccacagaaatacagactaccatcagaatgctataaatacctctatgcaagtaactagaaaatctagaagaaatgggtaaattgctcgacacatacaccctcccaatatgaagaagtggaatatttgaatagaacaataacaagttctgaaattgaggcagtaattaacggcctaccaaccaacaaaagcgcaggaccaaagagattcacagacgaattctagcagaggtacaaagaggatctggtaccattccttctgagactattccaaacaacagaaaaagagggactcctctctaactcattttatgagaccagggtcatcctgataccaaaacctggcagagacataacacaaaaaggaaaatttcaggccaacatccctgatgaacatcgatgcaaaaatcctcaataaaataccagcaaaccgaatccagcagtacatcaaaaagcttatctaccacaatcaagttggtttcatccctgggatgcaaggctggttcaacatatgcaaatcaataaacgtaatacatcacataaacagatctgatgacaaaaaccacatgattatctcaacagatgctgaaaaggccttcgataaaatttaacaccccttcacgctaaaaactttcaataaactaggtattgatggaacgtatctcaaaataataagagctatttataacaaacccacagccaatatcatactgaatgggcaaaagctggaagcattcccttggaaaatcagcacaagaaaaggatgacctctctcaccactcccattcaacacagtactggaagttctggccagggcaatcaggcaagagaaagaaataaagggtattcaaacaggaagagaggaagtcaaattgtctctgtttgcagatgacatgactgtatatttagaaaacctcatcatctcagcccaaaattcccttaagctgataagcaacttcagcaaagtctcaggatacaaaatcaatgtgcaaaaatcacaagcattcttacacatcaataatagacagacagagccaaatcatgagtgaactcccattcacaattgctactaagagaataaaatacctaggaatacaactgacaagaaatgtgaaggacctcttcaaggagaactacaaaccactgctcaaggaaataagagaggacagaaacaaatggaaaaacattccatgctcatggataggaagaatcaatgtcatgaaaatggctataatgccaaaagtagtttatagatttaatgctatccccatcaagctaccattgactttcctcacagaatcagaaaaaaactactttaaacttcatatggaaccaaaaaagagcctgtatagccaagacaatcctaagcaaaaagaacaaagctggaggcatcatgctacctgacttcaaactatactacaaggctacagtaaccaaaacagcatggtactggtaccaaaacagagatatagaccaatggaacagaacagagggctcaaaaataatgccacacatctacaaccatctgatctttgacaaacctgacaaaaacaagcaatggggaaaggactccctatttaataaatggtgttgggaaaactggctagccatatgcagaaaactgaacctggaccccttccttacaccttacacaaaaattaactcaacatggattaaagacttaaatgtaagacctaaaaccataaaaaccctagaagaaaacctaggcaataccactcaggatataggcatgggcaaagacttcacgactaaaataccaaaagcaatggcaacaaaagccaaactaacaaacaggatctaattaaactgaagagcttctgcacagcaaaagaaactatcatcagagttaacaggcaacctacagaatgggagaaaatttttgcaatctatctttgcatctgacaaagggctaatatccagaatctacaaagaacttaaacaaatttacaagaaaaaaacaaacaagcccattaaaaagtgggcaaacgatatgaacagacacttctcaaaagaagacatttatgcagccaaccaacctatgaaaaaaagctcatcatcactggtcattagagaaaagcaaatcagtgctcactttgacagcacatgtactaaaaaaagagaaatacaaatcaaaaccacaatgaaattatcatctcacaccagttagaatggcagtcattaaaaagtcagcaaacaacagatgctggagaggatgtgaagaaataggaatgctattacactgttggtagagtataaattagttcaaccattgtggaagacagtgtggtgattcctcaaggatctagaactagaaataccatttgacccagccatcccattactggggatatacccaaaggattataaatcattctactataaagacacatgcacacatatgtttatcgcagcactattcacaatagcaaagacttggaaccaacccaaatgctcatcaacgatagactggataaagaaaatgtggcacatatacaccatggaatactatgcagccataaaaaggatgagttcatgtcctttgcagggacatggatgaagctggaaaccatcattctcagcaaactaacacgggaacagaaaaccaaacactgaatgttctcactcataagtgggaattgaacaatgagaacacatggacacatggaggggaacatcatacagcagggtttctcgggggtggggggctaggggagggataggattaggagaaatatctaatgtagatgatgggttgatgggtgcagcaaaccaccatggcacatgtatatctatgtaacaaacctgcacgttctgcacatatatcccagaacttaaagtatagttttaaaaaatagaatgtgagtaatgaagaagaaaaatatacattcatatatagaatgtgtagacttcttaaacttcttatgctgacaagccttgattagtgatgctaaagattatttctcacataatgcaaatgacagttggtaaagctgctgttattactgctggagaaaaaagaaggaaataaatttcctgaaacagctctgttttaaaggtatggggctcaccaaaattactggcaattgtactgagactgaaaggagccaaatgtcaactcatatatgccagaagacagataaagaagtcaagaagtttcaaatatagtagtaaccaccactgtcttagtaacgcttggattacagacatagtgaaaaatttggtaatcatcttaattgaagcagaaatttgaccaaaaaattaaaaatcttctcttcccctcccgctgccttaatactttattcactagaaagtacctgcaactctcttcatctcttttcctggggagtcaaggccaaggtgaccataggtaaattatttaatcatatggtgcctcatttttaataaaataaattaattcatataaaggaaatattgtggatccaggtttccttgttctcaattcaaacccattatgatactgtagtaaaactctaaccacgtttttcacatgtaggtcagttaatataaaatataaataataaattgctaggttgcagaaaaaaaaggaaacgctattttctgtaactattttgtacaatagtcacaactttttacacttagcaaaaacaggaggtaacctgtgtgataagtcttaagagtttccaaagttttttcacattaattgactcattgtacccttacatcagctctgtatcccattttacaaattaaaaactatggctcaaacatgttgaatggtttgtccaaaaataaatcacagaagtcataaaagacagactcaagctcagattttaatatcattatttctaatttagattagagggcctgcctcccacctacaatttgaaggctttttttttttttttttttttttgagacggagtcttgctctatcgcccaggctggagtgcagtggcgcaatctcaactcaccgcaacctccacctcctgggttcaagcaattctcctgcctcagcctccacagtagctgggactacaggtgcatgccaccacaactggataattttttgtatttttagtagagatgtggtttcaccattttagccaggagagtctcttgatctcctgacctcgtgatccgcctgccttggcctcccaaagtgctgggattgcaggcgatttgaaggcttttatatattcattctagccatggctcttaagtggagatttctgtaccagtaatacgaatctctggttccaccaaggaacatctggttcctctcctttaggccctagagagttcccacttgccagccccatcagcctagtctttgcctctcattggaggcagcagcagaaggaccaatggtaacaaccttactagtagttgagtggcaaagagaaacagataaacaagggaatacagtgctaactgccccctcttaaaatggatttgtggcatatttcatacctcaaggtcttgatttgctttttaacatttcattcactgagaaaaatgacggacatgcctaatttgatagcaaggcacaaagagttcttcagtcctagaaacaatatttgctcaaatccatgatagtttggagctggaagaaaccttttaaagactgggttatatccttcatttactatataagaaaacagcttagaaagactcagtgatttgtctaaggttacttttcttaagtttaattttttttgaaaaaaaataaaaaaggagtaaatgtttttcaaatttgtctttgacaacttttacatggggaaaacaaatgaagatctgcccaaactttttagatgtattattttaagagctgccatttttttgtttttcaacatcctggctggaagtgaataaatcagggaaaaggaacttgtcattctgtttaataaaaaacaaatacagaagagaagtctgcttaccaaaatacataatgtcccatactacagcagtattcatgatatcaagaaattcaaggaaaggaaaataatggcaaatgattgcccaaacttccaggaagtttttttcttccagagtttactgaagaaagtagataaagacaagatcacctatgaagtaagatattcccagaaaattctgtttgcaagtaaaaattgtatttgactgttctaaaacgaaggaagaaatcagactttatgaagcacattggaaagtcccatccttcccacctatgcgtatcctcattagtacagatgaaataacgaaagccgaggtctcactggttatgatccaaactgcatggtctggtttccactaggaagtaaactaaatttcctaataaaatgtttttcttttcccgttgaactgggtgatttccttgtaaatgatcaataccatctcaaagaagtatatttacagttaaagtggctaatgactcatactttgtttttgagaatggttcctttaccatcttttcattgtctctcaactttctatcatctactttaagaatttccagtgcctcacatctttattaacaaagtattacaatccaggaatgaaaagacatcaaaactgaccaagatcgaagttataactccgtagtagcatacaaacaggaaagagaaaacaaactagtaaggcagactaacacaataaccaatgaactgaaacagttcttcaagccaagctctaatgtcagagaaggtaaacctaaaattcactttatttatttctattcctggaatgaattcctactctaagcaagaataacagcagcaataaatctaaagtaagacaagaaattttaaggaagcctacctctctaccttttttcttcataagtgtgtgttttcttcaacacacacagttaaatatcataacatatacttatagataagctcactaatcaaaatatcttactagactgtttaaagactacctctggtggcttaggtggaacagagatacattgcctcctcaaaaagcctacaattgtcccaagtttttctgccaatatttttaatgttcttcgttattttaacatacttactgttttataaaacatactttgcaactaattttgcaagaatttatcacaattcaaattttggacttctgtccctaggaaaaaaaaagttctaaatttcttaaaatatatattattttgttgcttcttttgtacacttagtttttataaaattccttgcatttttataactttcagacaccaagacagagagagagagagaaagagagggaggggattgtgcaatagaatcctgcctcagccaactctcagtagtctgttggcagaaggcctgtgtgtgaactatttccaagacctcggtctgaaaggcagccaaaggcttcacaaaagaacaggcccaaaatggcttattacctttcacctttgacctgtggcccagctacctcatagtttacgaatttgaagtcttatgagagaattctttgccaacctgtttacaaacagctgacttattccacaggaacggtttggcaggacatatccaggtcacctgaccttgggttgtcacagaaaccatgagcctcagattcgtggttaagtgaaaactgcaacattttggctgaaatcagtattggattatgcagccatcatcaatcatttaattacttttatgtgttcatgtcaccaaattattaatacagaaaatgtgaaagcaatcatactagaaccacaaatggtataagtcatggcttccacagaaaagagaaaaagcataaatttttaaactgaatattacaagttaatctcaactattacactgtcctagatcctgctaaatttatcagtacacaacaaaaatcacacgatcttttagttattcatgtgttttcaaaactctagtgtttgtcttagtcagacgttaccttacattaggcttttacctgaaaaaattacttgattaaatccattatctccagcatgtttgaactaatccctcaaggctgatgctttgatcattttggtgattcctttaaaataattaattctcacaaattattaatgagtacaaatgtggccagatttttttttaaactgggaaaattgattttaagaatgaataaattagtgagtgatcacatttcaaagggtcatttattattcaatggatttattttcacgagttattttctgaatttcctagccgcactcaaaacataattaaacttacaaaaatgctgtatgcacacaatttatcaggaatatctactctctgaaataagtacagcacaaatgagttttcttaagtcaagaaaactgtatcattgtatttacatatatattcaccactaaggaaaattaaattaattgcctggatacttcacagcagggcagccactagataaatggtaaataatggattttaatttaggaaaagagttctcttttttaatctaagaatgatgatgatgataggtaacatttattgaatgtactgggcactactgcaagcactttacatcgattagctgatttaatcttcaaaccactctatgagatagatattactatcattttcattttacagaagaggaaggtaaggcttaaagaggttaggatatatctctagtaagagaaaggcttaaaatttggccttaagcaatgtcgtttaactttactgcctctcaaaacatagcctctaggccaggcgcagtggctcacacctgtagtcctagcactttgggaggccgaggcaggcagatcacatgaggccagttcaagtccagcctggccaacatagtgaaactgtctgaaatcccagctacttgggaggctgaggcacgagaatcccttgaacccaggaggcggagctgtagtgagccgacattgtgccactgaactccagcctggggaacgagcgagtgtcacaacaacaacaaaataacatagcctttagaaaacaaagtatacaagcattcaagtaaaataacatgttattacttagaattataatatcaaatacagcttcataaagcaccctcacaaaaattatctcatttgagtctcacgattaccctgtgaggtaatactatcattcctattttacagatgaaaaaagtaaagctaagaaagatttgacttatccaaggttacttggctagcaaataataaagtgaagatgccaatacatgtgttctaataccataccttatatttttcttactataatgagtctttttatttcacactcagatcttttctaagatgaaatattattcactcaacaacaattcaaatgaagaactccaataagaattagataagaaataacaaaataaaggcatccttaatttaacattaaacaaattatcatgaaacaatttaatgaaaataaatcccattttccatacttaaaatcatatgattcctagtagcaagattttcattttccttacttagtgtccataaatacattcttaattcaaataatgagaaaaaagaggtaggaaggcctatacggaaggcctatacccaaaggattatcctatgaccctgccaggcagagaagtagatcatccaggaaacaagtaaattacgatccagccggtgtaaaagctataccaaaaatctgatttaaaaacctctattggtccacctcctatgaacatttttaaagaggttcaccaccacctacattattagcaatattaggctaggcatattacatcgaagatcatttccaatgtgggatgctcctaactcttggttctccattgtcactgtttgtccaaaagccaaaaactatctgtttcagaaaaacacagattttaaaataggcatctataggaattagatggtatgcaattttaggaagcaacatatttaccaaaagactaaatacaatatctgcaaagcagaaagtatgttaaggaaagttaactcatgagttactagagcaagagattttacaaagctatccttaaacagaatgagagactcagacaaaaaaaaaaaatggaaggaataaaggtcgtacctttgctcatctgtgacaaagctctctctttggtcatgtctgtggcataactacagccactataaaataataagttaaaaaatgtattagagaaggtaaaaagaaaaaaataaaaaacaatgtgaaaataaatatttgaggaaaaaatttaagtattttaaaataataaatataaaaaatttaaaagggaaaattaaaatagaaacagaagtccttagagatttccttctacaataaacggaaaaattttaaacaatcagcatatacatgacaacatgaaactttaaaacagtgttaacatgttgatgtatacaacagaataagtctgtaagaagcaagaaataaaaagatactgagaacacaacaaaaaaagaaaactatagcccaatatccctcataagcatagacgcaaaaattctcaaaaagacacaagcaaactaaattcaacagcacattaaaaagatcattcattctgatcaggtgggattcatcgtagagatgcaaaacagtaaatgtgatataccacattaacagaaagacagacaaaaactataaaatcttttcaatagatgcagaaaagcatttgacaaaattcaacttctctccatgataaaaactctcaacatattaaatatacaagacacttaaacacaataaaggccacatatgacaaacctatggctaacatcatgcaaaagatcaggaagaagacaaggatgcctactttcaccacttctattcaacataatactgaaagttctaagtagagcaattagacaagagaaagaaataaaagacatgcaaactggaaaggaggaagtaaaactgtttgcatatgacatgatcttatatatagaaaaccctaaagactccaccaaaaaaattgttagaataaatgaattcagtaaagttgcaggatacaaaatccacatacaaaaatcagcataatttctatatgctaatagtgaactatgtgaaaaaaacatagaaaacaattccatttccaatagctaccaaaaagtaagatacctaggaataaccttaaccaaggaagtgaaagatccctacactgcaaactataaagcactgatgaaagaaattgaagaggacacaaataaatggaaagatatcccatgttcatagactggaagaatattgttaaaactgtcatactacccaaagtgatctgcaggtttaatgcaatacctgtcaaaataccaatgacatttttcatggaaatagaaaaaaaaatcctgaaattcatacagaatcacaaaaactccaaatagcaaaagcaatccttagcataaagaacaaagctggaagcatcacactatctgacttcaaaatatactacaaagctataataaccaaaacagcatggtactggcataaaaatagataaataaatcaatgaaacagattagagagccaagaaataaatttatgtacctacagccaactgattttcaacaaaggcacaaagaataaacattacaaaaaagacaatgtcttcaataaatgatgatgagaaaactgaatatccatatgtagaagaatgagaatagatatctacctctcattgatatggtttggctctgtgtcctcacccaaatctcatcttgtagctcccataattcccacgtgttgtggaagggacctggtgggagatgattgaatcatgggagtgggtctttcctgtgctgttctcgagatagtgagtgggtctcatgagatctgatggttttaaaaatgggagtttctctgcacaagctctctttttgcctgctgccatccaggtaagacatgacttgctcctccttgcctttcgctatgattgtgaggcctccgcagccatgtggaactgtaagtccaataaacctctttatttcatcaattgcccagtctcaggtatttctttatcaacagtgtgaaaatggactaatacactcatcatgtacaaaaatcagctcaaaatggattagacttaactataaaatccaaaccatgaaattattagaagaaaatataggggagatgcttatggcattgggctggacaggaattttttaaataagaccttaaacatataggcaacaaaagcaaaaatacacaaatgagattacatcaaactaagatgcttttacacagcaaaggaaacaattaacagagtgaagaaacaaatattctcctattctcctacagaataggagaaaatatttgcatattgtacctctgacaaggggttaatatccagaatatataaggaacttaacaacaacaaaaaactcaattttaaaatgggcaaaagaccttaatagacatttctcaaaagacaacatacaaatggtcaataggtatatgaaaaaatgctcaatatcactaatcagtagggaaatgcatatcaaaaccactatgagataccacctcacttcagttagaatgactattttcaaaaagacaaaagaaaactagtattggcaaggatgtggaagaaaagaaacacactgttaacaggattgtaaattagtagtcattataaaaaagagtatggtggttctttaaaaatcttaaaatagaactaccatatgatccagcaatcccactactggatatacagcaggtactccaataacatttcattcaatgtccttcattataaggcatataagaaaaaaaattgattctcagctacgccactgtctgtctggaatttgcacattttactcatgtctgtgtgggttttctctgggtactgcagtttccccacatatctcaaagatgtgcatggtaggtgaattggcatatatacatagtccagcctgagtgagtatgggtgtgtgtgagtgagccttgcaatggtatggtgtcctgtctagggctagttccttccttgtgccctgagctgcagggatggactccagccacatacaaccctgaactggcataatgggttggaaaatgaatgaatgaatgaatacaaattattttaaattaaaaagtcatggctgggcacagtggctcacacctataatcccagcactttagaaggttgaggcaggcagatcccttgagctcaggagttcaagaccagcctggacaatatagtaaaactccatctctactaaaaatacaaaaaattagccatgcatggtggcatgggcctgtagtcccccactgctcgggaggctcagatgggaggatcacctgaacccaggaagttgaggctgcagtgagccataactgcgccactgcactccaacctgggtgatgggagtgagactgtttcaaaaattaataattaaataaataaatattcacaaaatatacaataatcacacaaatgtacaacaacaaacaatgctgcacgaaagtgttgagcatgcccaccatatttgtgattgtttttgaacctaacagttgtaggaaatacttcttataatttttctttacaaacatttattccttgatttaatgcattgccactacagccactgtcactcactgattcacaaaaagatgagtaaataattatcttgtttttattaatctttcttaaatatacatgtaattcacatttatttcaatgtttagtattagaaatgtgggtctttagaagtttagtgatgtttttataatcagaaatataccataggaactgccccttgtttctatcaattagcctttgaaaaaattggtttcgttatacatcacttcacttaaagtcagtttccaagaacttatagacaatgttaagggaggattactgtatatccaaaggaaagcaaatcagtatatcaaaaagacatctgggccaggcgtagtggttcatgcctgtaataccaacactttgggaggccgaggcaggcggatcacttgaggtcaggagttcgagaccaacctggccaacatggcgaaacccatctctacaaaaaatagaaaaattaggcagaagtggtggtgtgagcctgtaatcccagctactcaggaggctgaggtaggagaatcgcttgaacctgggaggtggaggttgcagtgagctgagattgcgcctctgcactccagcctgggtgaaagagcaagactccatatcaaaaaaatatatatacattttcactcccatgtttattccagcactacttaacaatagccaagatagggaatcaacctatgtattcaacaacagatgaatggataaagacaatgtggtatatatacataatggaatactaatcgtccattaaaaaaataaaatcctgtcatttgtgacaacatggatgaacctggaggacatcaagttaagtgaaataagccagacacagaaagacaaataccacatgatctcactcatatgctgaatcttcaaaaaaaattatagaggcagagagaacagtggttaccagagactggagagggatcaggggaaggagggaatggaggatgggaagaggttggtcaatgggtgcaaagttacaattagacaaggggaaaaaattcttgtgttctattacacagtaaggtaactatggttaacattaaggtattctctattacaaacagcaagaagagaggcctttgactgttctcaccacaaagaaatgataaaggtatgagatgatggatacactaagtaacctgattggatgattatacaacaaatatatcatattgtaccccataaacatatataattataatgtgtcaattaaattttaatttaactaaataagagacagaaaggaataaaaaataaagcagtgtcagtgtctcaagatactaagacaacctatgtgaattagcccaagataagcctaccatgtacaacaaaaaagcaaatcacttggctcctagaatatgcctcatgaccacaagtgcaactcagggatcttgattaactcaataaatttctatgtgatcagtttattctcaatgttttaaaatcatcaccagtatcatttcaaaaattttatactacagttgtcactggttttataaatatgcaaaaatgatgttgtttggggatctggggataaatgtgtcatgaaaaagaaaatagagaatcactaatgttgaatactctctttgaatggaaggaatatgtctgatgagtgtctgtcacctgtttaaaaagaaaaaaagtaagatctttcagagtagtcctgagatctgttctccaaaaagatgtttctggtttctgtttccttttctttctttgtatttcaagggctgtagctcactctgcttgcaaagcccatcattctttgcagctctagtatttcacccaataggctcaaggggctattctcatggaatcttatctgcttgccagcatccatttacttttctgacattccagcactaaaaattgctttgaagccttcagtgtttcctctataatgcaaatagatagaggtagttttaacatgatttttgacacttaattcaaaagtgacctgttatggttttagtggagttgtgctaaaaatctaaaacaggaacatatcctagaaatgtgcaagccaagataaagaagaatttttcccttcaaaaaaaatttaaaacacacacacaaaaaaacacacacaagtgtacactttgccactggaaaatacaataaaattgtggtacagctgaaattgagagactctgggggagaaaaagcatgggaacaccaatacaaaaaaatggtcactccgttctactgtgcaagtacatgagtgcttatgatgacacacatattactggtttgatagaagaaaatgactttttacttataacagtttaaaaattaatgcttcaaaacactttccaacgttagccctcactttttcttttctcctgcctcaggtttccctaaccacctctaagtgtcaccttctacctgcagattctgtcctacccttgtatttgagttaattttgactgaggtaagaaatacacaactgctttaaagcacacttcatgtgtctcttaccatttggtctttcaccacattgaggtaggaggggtaaattggaaggaggtgagaatggtaaatacaatcaattggtttccatggtgtctcccaagcttcactcctcccatgtgataagcaggcccaccataaagtttctgaggcttcctttgcctctcctgtattccagtcagaataaatgagttctcactatactttttcctcctgggaacaacagtatgttaagccatggtctttcagtctccctcaatggaaatcaataaccctaatcctgatagctgtggtcttaaacctagtggctatgcctcctccctaaatgtatcaatggacttcttcctatatgactgctctcttaaattggaatcaccaactcagtttcttactgcttggttggtatacctgtggggactttgcaactttaccctggatcccctgaacaacagtttttactcaaagtataactggatataatcgaaaatttgaacatcagcaccattgtccctcaaaccttccactacccctttattaggacagcaacctttccacctgtcctgcttgagaaatgaaacctattgtcagccctggcctctccatcctgtatgagctacccaaccagactgactcaataacaagcagggcaggaatcaaataaggaaagcaagacactcacattggtgcaaatttaagggggtgtcaaaaaaaaactcagcaaacacattaaataatattttaatgcaatgttttaaacaatcaaaattaatgtaaaaatctacaatgaacaagagatcaaaattttaaatattattacttatttttctttttgcctcaggttccaatatggcaaagtacttttagtgattctgtctttatttaaagttttgacattttattcattgtgcattttgtgtgaggcaaatgccttgcgcatctcaccttagtcctgaccctgccaacaagtaccagggtaaaacatactagatgaaaaatgtgaccttgatagtaatactcatgaagaacaaaaactggcttagaaaattttctgtaattggaatgtaaaatttgaaataaattacttagtatgaaataaaacctgtgaaagtatgacaacttattaagacctaaaaatttttaaattataaactatcttcttgaacttctattttcagtaatggaaggttaggttatttggaccttggcattattgatatttggggctatgtaatttgtttgttgttgggggtggcctgtgcattatagtaagatcaacagcattgccggtctctccccaccagatgacagtagttcccccaaccccagttctaacaactaaaacatctccaaacattatcaaatgtcccctaggggaaaaaaatcatccccagttgaaaaccactagttgaggccattcctcctgctaaaaactgaaaatgcagaatttttttaaatgcaatcacttaaagcactaagctgacaagataatggggaactgtcatgccaaatcctgggtgaagtaaaaaacccaagtttacctttctggtaagaagaatatcgaacacctaagccaatttgccttgaggacatttgcctgttggcaaatttaagcttcaattctgaaacatcaaaggcaaggggtttagaaatcaaggctcaagatcccatgtaaggtggcacatagaccagaaaactctctctgcattaagttagacctcaaagggctatacctagaatgaaacctgccgtcctcatttcccacccaccccaaggacttccatgaaggttgtctggacactaagaggagcagaggaggaaagaaaagagaaatggcaaaggagggaaacatctgtctaaaaatctttggccacagcctggccctcattaggatttactgaccaggttctcatcaccttgattgattgcggaatttcaagctaagattttggttgaaatgatcccaagatcctcggcaaaagcaaatgcaaattattcctaaaagttatcttcatttaagcctccaggactctccaaataattttgcaagggcagtaagaaagataaccaagcatacaaggaaacaaagcaacatgggcaaaaacatgcataattacaggacaactgaaacagacctactaagacttcagatattagaattatcagacacaaattataaaactacacttgcgtatttaaaaaattaaatggcatgattgaaaatatctccagggataggaaactacaaaaaaaatggaaaagtaatttgagaaagagtcaaatgaaatttctagaaatgaaaacacaatgactgaaatttaaaactcaatgtattgcatttgcagcagatcagacccagaaaatgacagaactagtgaactggagggcagataagaaaaaaaaaatgactcagagagtagcctaggaaccagcatgcatgaaatggtgagaaaatctaatatatgtttactcttgagttccagaaggacagaagaaagaatatttgtggaagcaaactcatattttatcaatggtaacttacaaacttttttaacatctctgaaatcaagacacatctcaaaactgacagtttcttataattactgttggccaggcagcaatcataatgtatttgtgctattcatgttatcctcacttcagctgacttatgtacattattggtagtaaataagttgagtttaattgttgcttaaaatgtcttccaatactatgattcagcattgagaagttgttgcgatatgtattgcacttccaaaaagtttgttaaaagtgtatatacaaaggcccacagtctgacattagtgaagaaaatacttgtaattgaagtcatggccacagttcaatggtcattagattcctgcaaagcaagaaaagagaaatgggaaaggagggactaagtacttaacaggacctaagaaatgaaaatatttgagactctagctcaaaaaataaaataaaatatttttatacaaagttaatttaaaactaaagataagtgggaactcagtaattaaatgaacaaatatagaacatgattatatgaggaaccatagatcaggaaattaataaaagtgaaaactaattttcacaatgagctcacaggcagccaagacaaaaaggcaaatggtgcattacagtcatttgtcaaaagttgcataatcattagaagacagaaactttcattaacgctaaattattataaaaactagcatggattctattatgccatagaatatataattatatgggttggcacattatataatttaatcttggagaagaaacagacatctcaaaatagttgactttacacagcctgctattatttttgagtccccaggcagcatactctgaagaatttccaataatcttaataaattatatgaaatcctaatcttaaagtcttaatcttaaatataaaattagagtaattgttagtaatttgtaatagccatgcaaaaaaatgagttattcggccgggtgcagtggctcacgcctgtaatcccagcactttgggaggccgaggtgggcagatcacaaagtcaagagatcgagaccatcctggccaacatgatgcaaccccatctctactaaaaatacaaaaattagctgggcgtggtggtgcacctgtaatcccagctactcaggaggctgaggtaggagaatcacttgaacccgggaggcggatgttgcgctgagccgaggttgcgccactgcactccagcctggtgacatagcgagattccatctcaaaaaaaaaaaaaaaaaaaaagagttattctgtaggtacgtctaatctaataacatcaatgatatcagaaattataagaatgactacaaagagtttgcacctatggggggcttttgataagaaaaagtatacatgaagagatggattggatattaaagacttagtaggagcagtgtgaggacagtttagcagggccagaagcagggaggaacacttaagtccctatagagttaagatgggttacaccgtttaataacaaacatcccataatgtccacggcttagtacaacaaaaatttatttctcacttaatgctatgtgcacaaaattcatcaatgagggtttatacttcatattcacttaagaaccaaggctgacagaggttctgctattttgtggatacaccataaagtactggtgacctacccccagtcccccacaatcccatcaccctacaaagtggctagaaaaatagaggagtacttggttatttgacaagcattaagtatctctgtaactattcccagctattagtgtttctgtaccacaaaatgacttaatgttttggaagagtcacaaaatagaaacatccactatctctaaggccaaattcattttactctatgctaaacttctattaagtaataaaaggcagtaggtgggcattaatccacacttttgcctcttaggcaaattgctctttttctcttccttctctcacacttttactgctgtgcatttctttaaacattagtcattttttggcccaagcctggatacactgtaatactttcctagcacctacttaacctactcttcttttgttgttaatttcattaattttgccttaacctcagttgttaaacatttcattctacccacataattcacataataattctcatactacttgggagacaaagtcagtcaaataaattcacttgtcgttaccaaaagagatcataggaaatttcatccacggaagtctaggaatctctttacacagacaagaggctatcccaagggatccaggagccttgctaagaagttttatatagagacaacctgagtgggataggaaaaaatcatggtcttcagattcggacagactgagtttgagttcctgctccttcacttagtggttgtataactgtgggcaagttaattaacctctccgaacttcagtttcctcctctctaaaatgaaactatgaatacaggaatcagagagaaggtttgtaaggtatctagcatataagaagtcttaaccgaaagaattattattactactgtacatggactgagcaataaacagaaaggcaatgtaaactgacacagaaggagaggagtttctacttatagattaaataaagggcatggtgcttcaaatactcaatgaactcaaatatcaaaattttccaaaactcttctcaaaaatttctagaaagcaatatcaaagaaatataaattatttaaagagaaggttgactattttatacattgcaattatcataagatttatgtaataaaaatttacatgaagcaagtcagagggaaatggttttttcattgggttaacaaccacattttgcctctttcctaggcatcaactctaatcagtaaactacaaaagaatagggtccataagtgcttttgcatgtcattttttttcattactggcacatacagagcattcaataaatatttgttaatgaacaaatggatgccagctattatctctggaattgatcgttttcgtttcaaggaagttgcctaatatattctttgatgatagtttgacagtttgacactagccatttctgtgacttgtgacataaataatgggggatgggggagaatgaccaactgtgatggttagttttatggatcaatttggctatgctatagtactcacttatttaatcaaacactaacctagatgttactgtgaagtgttgtgtagatgttgttaatgtctacaattagctaactttaagtaaaagagattaacttttaataatgtgagtggatcttatcccatgagttgaaggccttaagagcaaaaactgagggtcctggatgagaagaaattctgccttaagactgcagcatcacctgctgtgtgagtttccagcctgccagcctgccctacagatttcagacttgccagtccccacaattgtgtgagccaatttcttaaaataaatcatatatgtgtgtgcgtgggtgtgtgtatgtatatgcatatgcatatgtatatgcatatatatgtattttattggttccgttcctctggggaacactgactgatacaccaacaaaagtgtacattatttgaggctttaaagtactaggtagacatcaaaagtagaatgtactaaatgctattacatgtcgctgtagaccattagttttaactaaaacaatgccttctttatgttcttctttgatatcaatataaaattactgattccagccaacatctatcaccattaatgtccatgtcccttgaatctctttgcataataatgtatacatttctcagaatcaaaaccaaatatcattgaatccaattaaaagggggatctaaaagaattattttacatattatctataatatcaacagcaaggaggcctagaataatacaaaatacacttatgctattttagtgcttatgtaataaaaagatatcataattctgtactccatacctattaatctgtagttccaacttttagcatatgcctaagcaagagaaataaagaactaaccaaatccaggccaaggaaggatttaaccagaaatattcaaaagggccataaatattaatataccagatactatttaaaacctgtttatatcaccagaatagaaaatgtcagtgttaacatacaaaactagaataggcataccaatgtaatgttggtgatatgatgatattggtgtcaatgatattgacaaatacaatataaatttatgtaatgtgagacacttggaccatgttacaaaaatgcaaatgttattgtcttgcacatgtcaatcggaaaaagggagagagaatcagtgtcaagggttaaaataaaaatcgtggaacgtaaggctggcagattttatttatactggacatcctgaccactttacacacttacttagaaaagcaaaaaccagaaattccttcttaaatattttccttcagttttcctgaaggaaatctccagatatttcatttcctctctcaatgactgtcctattactaaattgctcaatgggagcaattaagcatcaagttgtacatcacaaatggaaacaacctagcaatctatttaatcaatataaacaatcaagctaattcaatcaatttatgtggtcaaaaaaaaatattttctgtctcctgctttcccctgctcttctttcattcccacatctatggtctagtcacagcaacaaaagcccattttaccatatatcgtttacctcagtatgtctacagaagaacaacaatgcctctagattccaaatgtccagctatgtcaaaacgtagaaagtacagagtcagactggagaatggcattattttacagctccagttcagtttatggttttctcacaaaacctactaaagttaaaaaagacttaaagtttttttctataattaataaactgggtcaggcacggtggctcacacctgtaattccagcactttgggaggccaaggtgggtggatcatttgagatcaggagttcgagaccagcttggccaacatggtgagaccctgtctctactaaaaatacaaaaaaaaaaaaattgactgggtgtagtggcacatgcctgtaatcccagctacttgggaggctgagataggagaatcacttgaacccgggaggcaaaggttgcagtgaatcaagaccatgccaccacactccagcctggatgataagagtgagaatctgcctcaagaaaaataaatacataaaaaataaacaagtaaattgatgctttgtctctccatttctaattccttaatttcaattataccagggtataacatatgttaaaaacatatttggaggattaatagtcataatttttaaatgaatgtaataactgattatatatataattcattgcctaatcatgaataagactttaatcccataaaagatgtttaatagcaattttaactactaagcataaaattaatagtgttaggggattgaaaattaaatttcaaggtagccaaagcataaattcaagaactttagataattttaaagagaacaaaatactaagataaaaaattgccatgtttatacaactatgtgtaacaacacattgctattctatacgttcatataaattcagaatattactcagaagggattttttataaaatatatccttataaagacaatgaaatagcaagaaaacaatttttagctctaatagaataaatcttattcacaaaggaaaacaaagaaagtaaggggaaaggcactgaaactctgaggtactaattactctgcttttacatgggggtaagtaaagcagtacaattctatggtccttatatacacaaagcttccattaacttttgatgagtctgccttcatgagaaacacagaattactttctcatatacaatttttttaattagtaagaggatctcataatgacacacagttcaggccctacattcccatgcatgagaattttcagtgaagtgacttcacttttactaagggaatgactgaattttgtgcaggattctcaagactgaattttgtgcaggattctcaaattcttaatatatcaatcacattaaagagcgcccattttcacatatacaccatggaatactatgcagccataaaaaaggatgggttcatgtcctttgcagggacatggatgaagctggaaaccatcattctcagcaaactaacacaggaacagaaaaccaaacactgcatgctcttactcataagtgggagctgaacaatgagaacacatggacacagggaggggaacatcatacaccggggccctgtcgaggggttgggggcaaggggagggatagcattaggagaaatacctaatgtaaatgactggttaatgggtgcagcaaaccaccatggcatgtgtatacctatgtaacaaacctgcatgttctgcacatgtatcccagaacttaaagtataattaaaaaaaaaaaagagtgcccattttattttcaatcacttggataaatgggattaaagaaaatacagttatactaaaggaattttctactactcagttgccagtagagttatgcatgaagaattcttattaagtcaaaagagagcagaatatatttgaaagcagagttgacccccttcattcggtttaacgaatggaaatactcaagattcaggtcactatgggcccttttccctactcaaaaagagaccctccctattaataaccattagaatgctccacatttttaagtttgcaacatcatggcctcattgcaaattgggtatttagggaaaactacatttccttccaaggaaaatgttttaaaaatgcacaatttctctatcacgcattttttaaataagaagaagagaaaatctaactgttttgcaactaggctcaggcaactgcccaggcagcctatagaactgatatcaacagttttatgcctgtcagaaaatcattctaaagactttttttaatctgaaaaataacatcatcactgtggattccaccctgaaatccgaaggcaggaattacattgtgttgttaaaatgttagcaagtgcatttcatttttttaaaaggcaatgtagttttcctgaaataaagagctgattatatctcttattactgttacaagaatttgatatatcacaaagtgaaagttacagcatgtgtcaactatcaaccaggaaaaatgaacctgattcataattcactttgataatgtctagttagttaatcaagtgatttgtaatcatgaaggctgccagaaattgaatgaagaatgggacacagtaaaattcttaggtttttttttttttagtattcttatttcgttatgtgacttttattgccatttttgatcactgtttctcagcagcacaaattaaatcacacatatttacttagaagtttttgactactaaatagactaaggatacacaagttgaatgaccagagtatataatgtcttcctacaaaattaaaggttttagtgtttacagcttgaacaggaaaatttcattccttccaatctcctcctctctctccccattttatttgaattatttagaaaatacgccactcattctaactcagtatatttctatatattctaaaacaagtaaaatcatttaacagaacctagttaataccagaaaccttaagcttccttttagtatcttcattgtaattcctcagttaaaactatattataatacaatagtcaaagaacatttaacctctaattaataaaatctcagtaaatagacaaaatataaaatcaacttatagcctgacatattactaaaggggtaatgtgataaatgagtgtttttcaaagtgtaaactactgagccatgtaagaatgtgccattctgacaatattggccattataagctttttcatcagcactgcatgacacagaactacacagctttaaagtaaattgaactttaaatatgataacaaatgggctcctcctttgatttactcttcataattttcaagcagaagggtccttttccaactttagactgattataagacaagatctccttagggaaagtaatagagttcttaagttccattatactcattattgaaatctaatatttattttttaaattcagctgtataaactttgtgggtaaatttccaataataaatgcttggtttttcaaaataacaaaattccagacacacattatacattgactccaagaaactagtataattatggtgagaccttgggaaagatactgttttccacactgaatattccctgaaaagcgtagcagcactccacttgggaattcacgttatcaccattatcagaccaactgctagaatcaccttttctttcctatttagcttattcattcattcattccacaaatgctcattaagctcctactcttgccaggtattatgctagaaattggggatataaagatgaatttaaaacatagtctttgtacttgcccttaagaaatctacagtctagtaagaagaagacataagtaaataagaacaatgaaatacaggctctagaagagatctatatcttggaaatgtcagtgacagaggtcagtagaggacttcaaagtgttcaccaagctcaatcttgaatgaaagttggtacctatcagggagcaaagaggaaagactataatggtaagaacgagaatatgaatgaagccaaaagtgcaaaataccttatcatggtaggataaatacaagctagtcagtttaactggggtttaacatgtaagaagtacatgttacatgttgggtggtaagggaaaaggctgccagaagcctctttcaaaaacatttcatattgatggttaggctagttataatcaggtgatgtcatgtacttgtaggataaggatcctcttcctcataactaaaagtagttttgacttcagtgagcatcagtcctacaaatttttgaccttgggatttgtttatactgtaaagaagaaaaattgaaagataataacaattacaaaaaaaaaaaaaaaggacacgagcaaagcaagactgtaaagaaaatttactttgacaacctgacaatggtgataactcaagtgaaagcaactagaataaagagggccaaagcaacataagtgactgtagcaagttacttacacatacacacacatatgtatatatacttcatgattatataagatttggtcaaattataaatgtaattagtacagcaaaatgaagttatgattattaaatactatcaaattatattgaccctgaactgcagatagctatgtagatatactactgactcttgtagtaatattaaatatatagaagtcaagcactatgtctctggaatagcaaacttgcaacaagcattaacgatggccacccattgactgactaaataacctatttgaaaatggaagagaatctttcctgaaatttcctgatatcagtaatacacttttttttttttttttttttggagacacagtcttgctctgtcacccaggccggagtgcagtggcgtgatctcacctcactgcgacccctgcctcccagattcaagcaattctcgtgcctcagcttcccaagtgaagtgtttttagtacagacaggatttcaacatgttggccaggctggtttcgaacttctggcctcaagtgatctcgccttggcctcccaaagtgctgggattacaggcataagctaccacacctggcctagtaatatatttttaaaataagtatacaacatatgtgatcaatatcactcttttctaatcagtatgtattcaaataagagtcatgaattacaagttagctggcatgtgttataaggaatgagaatggagatgacagaagctactcaaacaaattttaagtatattcacagataacaaattataacttcctttatttttcactgttgtgctgatttctttgttgtcctttgggttcaagtaatgaagcatcatggttcaacattccaataatgtctcataaaacaaagtttaagacaaactgttgtttgataatgctgcgaagataaaataacattaacatgatccttcatgtattaagatgacactgactcaccatcaatagagatgagctgcaagttgttgttccatagttgacataggcttcctgatctagccaattctattgccaaagctccccagtgaatggcagcttacatctgtaagatgattattaccagtggtcacagaaaataacaaaataaaatgatctatacagaaataaaacctatgcccttggtcccaaactaccatattctgataaacttttaaaaagtcacagaaatgtataaatactgtatgattctttcattaaaaatgatatatgtagttactctgatcaattcattgtagtctatatattacttacctaaatatgcaaataatgaaagcctgaccccctgcctcagaatgttctcagctatcttaactaaaacgaagattgtttctgacttgcaaaatcagaagtatataatgatgatgctcaaaacatgaaagcatgccaactttatatccctcatcaccagtagcaataactgaggaaattacagaatattgttgttaatgttagaaatattctctataccattaaatgtaatatgactacagccaaaattactttgacatttcctagaattctgaaaaacacttccattttttatgaagaaaaaatattttagttactagctacagtgttcattcttgttaataccgaggttttacaataaaatagttctactgactcctgatatggaattttatcagtttctagttgaatctccttcataaagctgagaagctgataaaatattactggaagacattgtttgtaagtaaaattaatgttacatgcttatttattatttagaagaataagaaattagattaacaacttaaaaattaataagaagccattaaaactagatataagtaaaacaaaatcacaatgttaagtgcctatgatgagcaaggcactatttagaggttctgtgaacaagtataaaaataacaaggcatagtacataacctcaaagaaatcacaatttagatattattgaaacattcttctttcagtgctccatagttgtttacaaaaacaaacagctagattctaacccagatcctctgttagcacaggaaggatgatgtggaaaagtacaacatcacctaccacggcatggtagctaccataaggatgcagctctggggctcctcttgcatatggaaataaggaaattttaatagaaatattgagaacatctgctgcaacctgtgatgcaggcccactgccacctgcaaacaaataaaattcattaattttaagacaccatataaacatttccagtcacaattctgttttaatgggtcatgcagcaagcatattctctttaacagctttccattatcatcccccaccaactcaccaaaattggatgtcttccactagattgcaaactcctaaagttcctcttcattttggtttccaatttctacaacgcctagccgaacaaataactcagtctagtaagaaattaaggttaaaactggctactataatactctgtaaccagttctataataagttttatagaaagtactacagatactaaaaggaaggaaaaactggctttaaagaatgagttgctgctggacagagagacaagtacagaaaaagcattcttagtggaaataaggtaaaaagttagggaggtacaaaagggcacataatattctgagaatttcaagtagctttttgggaaagcagcaaataagaagacaaaggcaggagaaagataacggagatgacttatatgctaaaaagctgaacctgtattctgactaaaggagtgaagacaggaaagtgaagtgatcattaaaaagatcttggcagcagtatgaaagatgggaggaagaacaagactgaaggcaatggactaaatcacacaagacaaagctggcttgacctaatggtatatggagttatggtgacccaactcatcaccaatgaccattaggtctgttacccactaagtctcaaatccaggtacatatttagacaatactacagacactaatttattttagaaaactgtttatgtaatataatctcaattaaaaagtggcaggaatttgacacaggaatatcaacatgtgaaaatattaataatgagtagtagcattagaggtcatgtttttcttcttgtcattgatatattccaaatgttctacataataaaattaaaaataaattctacaacaatttctcgaagctgtgatagctaaaacttgcattaaccctaaagagcctcacccaggatcccttgacaatataactgagcccaaagccttcttcaccaccacagctcactatccctaaagtatttattcctacatcaggactttatcccatgttctttctgcttctgtagcactctctggccccgaatgcccatctaaatctcaacttcatcgtactaccagttacacttatctcaaacacgcattacctgctccatacatttttacatccaatcatatttaatttattgaaaaccatcttcaggagttctcctgtttgttcttcctacagtttttatataagaacagactagtgcaagtcagtcctattccaaagcaaatgttcatacatgacccatttatggacatacgcacatatcattattccaacgttttgataaacaaacttatgtatataaccactactaaagagttttcgaatctatcttcagaaaagttgcctactgctatgggttgaattgtttccccccaaaatatgttatagccttaacctccgactcctgtgaatgtgaccttatttggagacaggatctttgcaaataatcaagacaaaatcattagggtgggccctaatccaatgtgactggtatccttacaaagaggtagatttggacacagagacagacatgcacacaggaagaacaccatgtgaaggcagagatcacagtgatagactgtaagccacaaaatgtcaaagattgccagcaaaccaccagaagctagcaaagaaccatggaacagattctccctcataccccttagaaagaaccaacaccttgatctcagacttctatcctccagaactgagagacaatagatttctgttgagtcagtcgcccagtttgtggtattttgttatagccaccatagcaaaataacacaactactaagggaaaccatgatttcttttgctgaaagtcactaaaaacaaaaacatttgtaagattacaaatcaaaaaaatatcttgctattcatttctcactctggtagcaaatgtgctatttaatagctaagccaatctagtgccaaaaacttctaagaataaacatgattcatccttcatcctatatagtatcatttatacagacagcatcacataatcaaacatcagagaatgtaatcattctatagatattaggataagagagtaaaatgaagttatataaatttttcttggtaatgcgtagagctgcttcgtgaattttcatgctgtgaaaatgtgatctgacccataatacaaccaaaacatagtataatgagttacttgatgagcaataatattggtatagaccaggaatgggctctgaagtaacacatacttcaattcaaatccttgctctgtcactcactagttacaggcatatcttgaagatattccaagtttaattccagatcacagcaataaagcaaacattgcacaaagcaagtcacacaaattttgtttcccagtgcacataaaagttatgtctacactataatgaagtctattaaatatgtaattacattatgtctaaaaaactatgtacacaccttaattttaaaatactttattgctaaaaaaaaaaatgtgaatgatcatctgagctttcagtgagatgtaatctttttgctagtggagagtcttgccttgaagttgatgactgctgactgatcaaggtggtgattgccgaagtttgggtagctgtggcaatttcttaaaataagacaataaagtttgccccattgattgattcttcctttaatgaaagatttctctgtggcatgcaatgctgtttgatagcatttttacccacagtagagcttctttcaaaactggagtcaatcccttcaaaccctgctgttgctttatcaactaagtttatataatgttctaaatctgttattacttcaacagtgttcacagcatctttaccagggtacattccatctcaagaaaccacttttttttcctcatccgtaagaaacaactcatccattcgagtttaatcatgtaattgcagcaattcggtcacatcttcaggccctacttctaattatagttctccctatttctaccacatctgcagttacttcctcctccaaagtcctgaacccctcaaagtcatccatgagtgttggaatcaacttcttccaatatcttgtccatgttgatattctgagctcctcccatgaatcacaaacgttgttaacggcagctagaagggtgaatctttgctagaagactttcaattgactttgcccagatgcatcagaggaatcactacgtatggcagctatagccttataaaatgtatttctttttttttttttttttctgagatggaatcttgctctatcgcccaggctggagtgcagtggtgcaatctcggctcactgcaacctccaccccctgggttcaagcaattctcctgcctcagcctccctagtaactgggattacaggtgtgtgccaccacgcccagctaattttttgtatttttagtagagacagggtttcaccatgtgggccaggctggtctcaaacttctgacctcaggtgatccacctgcctcggtctcccaaagtgctgggattacaggcatgagccactactcttagactcaaaatgtatttcttaattaataaaacttgaaagttgaaattactccttgatctatgggctatagaacagatgttgtattagcagacatgaaaacaatattaatctccttgtacatctccctcagagctcttgggtgaccaggtacactgtcaaggagctgtaatagtttgaaaggaatcttttttctaagcagcaagtctaaaacagtgggtttaaaatattcaataaactatgtgatgaacacatgtgctgtcatcctgactttgctgttccgtttaaaaagcaaaggcatggaagatttagcataattcttaaaggccctaggatttttggaatggcaaatgagcattggcttcatcttaaagtcaccagctggtttagcctctaacaagaatcagtctgtcctttgaggctttgaaatcaggcattggacttctctgctctagctatgaaagtcctagatagcatcttcttccaatagaaggccatttcatctacactgaaaatatgttgtttgttgtaaccacttttgtcaatgatcttagctagatcttctggataacttgctattgcttctacagcaacacttgctgtatacttacttatacttttatgttctggaaaccacttctctccttaagcctcatgaaccaacttctgctagcttcagtcattttctgtgtaacttcctcaaccttcacagaatcgaagagagttagggctttgttctagattaggctttcacctaatattgtggctggtttgatcttctacccagaccactcacaatttctctacaataagactgttttgcttttttgtttgtgttttccttggaataacacttttaatttccttcaaaaacttcctttgcttccacaacttggatgtttgacaagaggcctagcttttggcctgtgttggcttttgacatgccttcctcactaagcttaatcatttctagcttttgacttaaagtaaaggaggtgtgactcttcctttcacttgaacacttgaagcccattttagcgttattaactggcacaacactttcaatcttattgtgtctcagggaatagggtggcccaaggagagaaagaggaatggctgatcagtggagcagtcagaatacacacatttatcaattagctttgctgtcttcaacgggctcaatttgtggcacctcaaaacaattacattactaatatcgaagatcacagatcaccctaacagatactgtagtaatgaaaaagtttgaaatagtgtgagatttacaaattatgacacagagtcactaagtgacacatactgttgaaaaaatggcaccaatagacatactctatacagggttgccacaaaccttcaatttgtaaaaaacgtagtatctgtgaagcacaataaaatgaaccacaataaaacaaaatatgcctgtatatgacttgagcaaattacttaaccatgtttgagcttcaaactcttcatcaataaaatggtagttttacattttataaaaactgaagaaattagatgatatatgaaatgtgcttaacagatattaataataataatagggctttactatttttattaaaaggaatgtttataaattaaggatttttttacacttctcttgggtaggaaaaataattaagcaagctcatgtaagaacaaaagtcttgttcacgtatactgtacacaaaatattgcctttggctagttcctgactataaaatgtaggactttccgaattttaaaactatttgtcaaaactcaaaacacattcaaaacctaatcttggaactaaaatacaaacaggatctcagtgacttttggctttgtcgttgacattagttggtatgcagctttcaaagctctacaataccactcctttattccctcaaatttgtaagctttagccagtccagaaaaactacctttacaatttagagtcatatgaatttaactcaaataggatggtataatccactgaaccttctaccaggaactagtgatgtgtttgtttatctcttttaaatataaatcttgtaaaatatacatctcaaaaatcagctaattgaagaaaatacatattttgaattcacatacttcttttgagaaatatttaaataatgcaaaacctaacaaatcaccaaattcaaaaggaccttgttatatcatgcaaacaatctacaaaagatacaaattatattcccatatgaatttcaatacctgtgaactgaaatttgctcctatatctacatataaagaagtagaagaaattgcacaattaagtccagaaagactgcaattattatggaaagaatggtggtatttttgttaacctctttatctaaaagagctatctgatggccgggcatggtggctcacgcctgtaatcccagcactttgggataccgaggcgggcagatcacctgaggtcgggagttcgagaccagcctaaccaacatggagaaactccatctctactaaaaatacaaaattagctgggtgtgctggcacatgcctgtaatcccagctactagggatgctgaggcaggagaatcacttgaacctcggaggcagaggttgcggtaagccgagatcgcacaggcaacaagaacgaaactccatctccaaaaaaaaaataaaaaagctatctgcactggtcaaatttgttggaaaatatatcaacaacccacttctccttgtgcaagagataactattcttagcatctttttaaaaattttagtgagttataaaaatatgttcaatgctataataagttcaacaatattagcatcagcatcaaagctaatgtatggtcaagaccaaacataggtatttttttttaatatttatgaaaacaggccaggcgcagtggctcacacctgtaatcccagcactttgggaggccaaagcgggaggttcgcttgagcccaggagttcaagaccagtccaggcaacaaagtgagaccccgtctctacaaaaaattaaaaaattaactgggcataatggcgcatgcctgtggtcccagctccatatgagactgaggcggaaggatcacttgagcccaagaggtcaaggctgcagtgagctgtgttgacaccactgcactccagctcaggcaacagagaccctgtctcaaaaaaaaaacaaaacaaattttataattatatttatacacatacatatttatgaaaacatgttttgcctttattcttagtgtagttcctaactttaaaacagactttgttagctgagttttcgaaatatgaatgtgctttttgctcaattaaacaacataaaggtcacttttcagaaaacaatgttatttgcaaggagataactaaattgacacatttaatttaaacaaaatattttgaagtattaagaaaaactctaagattttttttaagtactgatttaaagttagcaaacatggctgggtgttatagctcacacctgtaatcccagcactttgggaggccaaggtgggagaatcgcttctggccaggagtataaggccagcctgggcaacataatgaaacccatctctacaaaaaaaaaaaaaaaagaaaagaaaagaaaagaaaagaaaataataagataaagttagcaaatgccatattctatttatttaagatacatactaaataatactataatttaggctgtccccaaattacaattcctatctcccaggcttcctaggctggagtgcagtggcgcaatctcagctcactgcagccttgacctccccggctcaagtgatcctcccacctcagcctcccaaggagatgggtccacaggcacatgccaccaagctgggctaattattgtattctttttgtagagatagggtttcaccatgttgcccaggctagtctcgaactcctgagctcaagcgatccatccacctcagcctccaaaagtgctgggattacaggcgtgagccaccatacccagcctcaattccaagcattttttcaaaaagtgaacagcaaggaaaaattaaatatattttctttttatcttaaagtcccaatatagtaatattaataaaaatcacatgaatacattatattaagaaaatataatccgttaaattattagcaaaagaccatatcaattattatggatagtaattggggcagggagtatgcctttatctactccacatgccttaagcatgataaaaactcaataaatatgtgttgaatatctatacttcgagaacaataagcacaatggtcacataattctcctaagaatcaaatacagaaaaatcttaaagaactgggcattcaaaacaggacatgaacaaatttttacatcatgcaaatctaacattggtaagagaaaattctaccccttgtatccacgaattgtaagtcacagctacaaattatgtactggctgtgtcaatggaaaatatatagccaatgctggttttgaaataatctcaacttggtctaaagtgaagtcattaagaactgagtagaaatggtgtatatatttaagcccctataattctgggattatatatgggcaagaaagtaaatttaccacattctgtgttatttttgttaacaccacaccacatctctatggagagctataataaataagaaagtgaggtaacatatatgaactacacaatgactatatattcttgtgtttcactagggtctctggttttagcattgctggtttagtggttaagtctcaatattcttaccgccattcatcctggttaatattgtggtcacggagaaaacaggttcatcatgggctagtttcatttatccacaccttttctcttgagtttcatctacctgctggagaaacacagggaaatttaatcagtgtaaaaaattccttatattacagatatttgctggaattttctattagacaaagagttgctttttgaaatattctcacacacaccctaaagaagctttcccagacagaaatgaaagaaagtatatttagtaagtgtgagcaaataaagcaatgcctaaataaaaggtgtactgaatactggtatctcaatcacattagatctctcttccccaacttaatataccacggaaattttcctattagaagctgacgaacatgtaagataatttgacctaaaatacagacaaataaatgtgttacctggtctgcttattaaaacacaactaccaggccgggtgcagtggctcatgcctgtaatcccagcactttgggaagctgaggtgggcggatcacgaggtcaggagtttgacaccagcctggctaagacggtgaaaccccatctctactaacaatacaaaaaattagcctggcgtagtggctggcgcctgtagttccagctacccgggaggctgagaaaagagaaaggcgtgaacccaggaggtggagcttacaatgagtggagatcacgccactgtactccagcctgggtgacagagccagactccgtctcaaaaaaaaaaaaaaaaaaaaaaaaaaaaaaaaaaaaaaaaaaaaaaaaacacacaactacctggagaatacttacagcacagacaaagctactattagcagcgtcacccaccctaaagaaaatggttactattataagttcccaagtatgcatttgtagaaggaagcagtagtttattaaaccaactttttgatcttgaagcaacagatttgggaaaagatggttttacaataaaatatataactccaacctccagttacattgctattttttcataggacagacatggcactgtgtgaatattatgactcaagcttagtcatctcaactaagaatgaattaaattcgttagagtaaaaacctgaaagggaaagtacatgcatgtaattctaagttgctatttttagaatggggtttttctccaaagagattttaaaaatgtatttccacattatttgtgctattttcactttagtactctggcatattggctactgaatagaaacaagaaacaagcccattttccaacagaaggtcatttatgatttgaacatagtataaactacataaaaaaggaaaagtaatttattaaagacctgcttgctaaaacactgaatttcagagacatatacatgtaaaaagacgcttgtgtttatgcccatcctattttcctggtatttaaagagatcaaaaaattaactgtagagtaagaagcctattgaaaacctcattatatctaaactactttattatatttattacattatatctaaatgactttccaggaaagtccagaaaatacagaagagcttcacaggttctgcaggacacacagtattgtaaccctataagcagcttccaggctaatagggcttcagtggtttttccctacagaaaagatagtccgagaaaaaaatctgtttctctattctctctcctcactccttcttaagaataatcagaaaaaaaatgacaggcaatgtggagtgaggaaaagacaaccttaatggaagtcaggaaaactgagttttattccctgccctgtgacttattatatagtcttaggcaagttacttagcctttcttggcctctgtcttttgtttgtttcattttgtttcatatggaacacaagaagcactgaaaaaaatgttttaattacacctagaaagacagcagagaccatagaggcctacccccaacttcacaggtgaggacactaaaacagagaaacatgcccagtcataggtgataagattaaaagacttctaacaacagtcacagctccaacatttaaaaaagtatttatttaaaaagtatttatttaaatttatttacatcaaatttttagaacatgtaaaaaaaagtaactaagtagcaaaaaggataactgccaaatttaggataattatcttttcaagaagccataaagaaatatattctggaaggcttcaattgtactgttaatattttatttctcgaactgggtttggggtatatggatgcttatttttcttcatataccattttgtatgaaatactttctagtctttttttatgtaatcaccaaaacatctttaatcaaaaggtaaaataaatgaaaacacttctctggaactttaaaggtcaatgaaaatagttgtgtatggtttcaaatattctcctgctgagtttaaaaggtaaatatcactgtgtcccccaacataagaaaaaaaaagcgtaatgtgctaaaatatatatatatataactatttctaatctaacttagtaaaatataaaagtactacacaaatagcacaaaacacaaaataaattttattactaatagcatgataaacccatttaagactattgagagacatacttaacaatctgtactttaaatacattcaagagtcacatctagtagcctagtgtttcatcgtcagattggctggttgtttttattgaaacaaataagaactgcaataatttacctaaagtaagcaaaggcctatctaaatatctacatagaacctatgtgtaaaaactaagtgcctccaaaatatctgaaattttccaacaagaaagtacaggtcattcagcaaaatatatttactgtatactaccataatagctatttaattgttatcattatgatgtagatatataatggaaacagatgttcctttttcctttcagcaaagcaaagggaaagtataaacttgctgatattgcatagactactaccatagcacaatagaggaaaaaagacattagcacatgacaatattagtttttactacacaactaattgcataaaaagtataacttgagatcattaaatcaatataattttcagcactacagaagagaaacaaatagatgtgtataaccagcctatttcacatctgcagttgggaaaatacttctgacagattaaatatatgcaaaacgctaccactgctttcagaacacaagaaaaagagtgttgttctgttttctttgctcatgtaacatgaattagaatgctgcctctacagaggaattttttttaagtaccagtataaattggtagaacctttctggaaaacaattgggcaatcaatatcaagaaccttaaaaaacagtctatattctcagtctaagtaatttctcttttaataacatattgtaaggaaataaccatagggatggctaaagatttatttaaaatgctattcattacaacttagtttatacaaatgaaaattaaacatctgagttgtctaatagagcaataattaaagtagatatgttaaaacattatagagtcaatataaatgactttaataattttaatcatattacattaaatgcttagaagaataaagtttagagaaaaccttattatacaaaatggcatttctaatttttgtaaattctgtcttatgggcatatactacttttatcagaaaaagttattttttctttaaacagttctatttctatcatctgatattctcagtccaaagtttctaaaattctttgggcaaaagagtcctataaatatttacaggtaaattgacttaaagttatgttgatatgttatttgatcctgaaatctggcacagaaaaagaagtatttgtcaatcacatagacaacacctttttttttcctgggttaaacggaatccttacaaattagggaaaatttttatggaacaaacattacaaatgcttccttaagatctattaatatgatatgtagtatgttgctaattcaaggaaattttcaattacaaatatttgtaaagcaaatgaagtagcctattgattgctgtttcagtatgccagtaaaaaagtttgccatagctttcctaggactcttagtttcctgattttatttttacaagaagaagctgatttgtcttaggctattactgtctattacttgtagaagtcttgagcaaaggtgggaagcagcaaattctggcaatctgcctaaagagaaatcaatgaaacaaattaatcctttgcaggctgcaatgacacagtaatccatcattcagagctgtttttatataccaaatcagagagcagaggaaaagagccctgggggatatcacaggcaacaacttacaccaacactgagaaaatactgaggaatcagtttatttaaagaggatagatttcagttgattgcctatttcgtcaaataaagatttttcttccacagtgtggtgaacccaagggccagtgactgtatcttcagaattcagtaccatctatgctggctgacaccaataggagatgaacgtttttaaataattagcatcattaatcagtatggtcaaatatctgggtaaaataaatattactttgtccatccaactacaaagtgttatacatggtccttgttttcaccagaaactaagtgtaaatttacctactaatctacaacttaactgactaattcctggtacaccatatttgaggtacttcttcacacataaaatgtaaccatttaagatatatgttacttcctaatgctgtgttaagtttaaagacttaaaatttttaattcaagctcttgtgtaaattccagcaagcaagtcagattataaataaatgacttattttaaaatgataaataataattttgctcataatgtagttgacagtgttggaagataaatgtggttttcttttacaaataaacataataaatgtacagcagtatattcaaactaagtatatttatttatacttttacaaaagcctatgtatttaaatttatttgtgcttctgtagaaagttatgcaccttactatgtcttactagagtaatgcattctaagtagaagtatatttccttgatgaaaactaatggcaagaactacaaagtcacagtgcattactactctaaatgcatgcatcatattcatggttaaatgtgagaagtcagtaaaagaaaagaattttcaagattataaaccaaagaaaacttgacacgagtccctgaaatggtaaaaccccagaatacctagtcacaaatccaaaacagaaaaagattaaataaatgctaactactcaatttttgagtggcatgttcgagtctgaggtccgtggccatatgatcacaattcctggctatgctgatgcatttttaattcaatgcatggatctagtatttattgatttaataaggttagaagaattacattgttgctgctactgatgaactgtcagcaatttaatccagtgaaatcttacacagaaatgtttattttaggggagaacgagaggaacaacagccatgtaaataaatttaattcctttactacccttgacagtgacaagagcaaaacccttcttttctagactgctttgggccccaaacattttctttgattaaagatgtaccagctgattgagcttatggtgaaaaagttgcaggatagccttgtaggtacaccttaaaaattaggaaaagcaatgactttctcccagtatccactctagtctctcctcataggtttgaggtacacacgcacccacacacctcaacccttaccttgtcacctaacaaggtttcaacgagcctgtcagcgatttcctctctctggaccctaaaatttcccacagcatcattagtacacaggaagacagaagagaagggagaaaatagaaaattaaccttcttaaaagcaattcggccaagagaggctttaagggctatgtcaaagtaaggaggtattacaagatccagaatcagaaagcgggtttaaaaaaatccacaaaagttgctgaaacaaacacttggggactattagaaagctttttgcactgctgcactaccctgctcctgggcttatctccccaacctggacacctgggaagcatgctgtgcttcagcgtttccctgactttgaagaaatggagcgctggtggtgctgctgcggaggtcagtaaaactatgctaattggtgaacctaattgcttcaagcagtcctgcctctaaacatggagagagtacagttgatggagtcagtctgttcctgataaaatgaagaaccactgaattaaattcccaaggaaggcactataaaagtttccacagtgtaaccaaatgacttcacctatgttattacctctaagatgacatctttgaaagaaagcagaccccagtcgggctccatattcataaattggctgagcttaggccagtgaatctggatttatttaaaaaggttttttcatctttccaatcaaatgaagtcatttttaattagatgctttctgttaacaatgtcactcttctccacattacctgctcacacttgcagcgcctctagtgcaacatctggagcacgagtcctctgcaagcagtcctcccaacagattggctggaggatggtagtatttccgtttctcagtccctgtctgaaggaagatcccattcagcgggctgatggcgcgggacatatcaactctctaaactgagagattacaaaacaatctctagaaaaactcttaagataacagtctcccaatatcctttttatgaactacatagcactttctccgctgttcccgccttgcagatgggtgttttaaaaagtgccaagggccacaaaaggaaactcccactgactctacagctttttgaaacccagttcctccttaaaacagaaaatcaggtgtgagggtccccaactgtgccccaggccttgcttcctacccctaccagcagcccaccacctgaagaggactggctgtccaaggcagggcaaatcgttaggcaccccaggaggatggcaaggttcagcgctttagccagcggcgggggaggaaagaggctaaatggggaagttgtaaaagcggcttcgttcgacggtggatctctgaaccttaaaagattggcggggacccactcacactccctggggaccattactaagaggtctgctgtgccgacccgagggggcgccaactgcccgcgcggaaccgggccgtgggcctggggttcgggaagcgtgcgccacccccggtcgggcctggcttccttcttgaatgcccccggcgcaggcccggtgctttgtccctccggccttctcaaggagtggtggccttctgcgggggcgagagcacggcctctagccttccgccgacgtctcagtgcgcagataccgcggcccgggcccctccgccgcgcgggggaccgcactagcgtcgacctcccggcagccaaccccgcgcgcaaggctccgcggccggatatgggcctagcttccgggatccgctccctgcggggccgcgcttagggtcggagttcgctagtccagggaaaggggtgggaggggccctcggaggggcccctacaagggatcccagtccgcagaattaaaaattcgttcgcaagggagcgcccttccggggtcagggtcgtgaagagacactcgagaattagggtcctggactgcagtggggccgggcctggacttcgggcaggtgtttcctggccgccctggggccctgcagcaccgagggccgcgctgatctcagggctcaggcggacgaggggccgccacaggcaccttaggaccctggcggcctgaaggcctggggccttcaggaaagcctcgggcactcccagcgggggacctagcgccaggtcacgattccattcggggcggggagcttctaagcaggagttgctgaccaaggaaagagtctggacccgggacctcatccctgaggaccagaccacgaccttggagctcagctctcagtccttcccggctagggatgcggaggggtcgggagctcgacggctaagcggcagggaatcctgagttcctagagatctacagaaagcagaagaacgacactagatgagactagacagtgacggcggaaggacggaaccacatggagactgacacactttgcgagttgggactcaattgcatttctttaagtccttgattccgaagtttccccgccctcctatgcaagagcgtttggggaaactaagttccttagactctttcatccttgttatgtgagctcagggaggaaggcagacaatagctgcagcctaaacacctgctatctctcaatgcaataagatatagacggtgattggagtcgtttctctttttgcttccagagggagctcaaacctgaagcatcaaggttatctttttccaaaggtaaaacaagagacttgcaaaacctgctagggacaccacagctcacatctggagggggttcccctttgcaaacggaaaaggcaatatgattttttttttcattttaggatttgtgtgaacctaagttcggtacctgcgacgagtaaaaacacttatttgaccctctagagactcagctagaactgactgagcaaagggaaatcgggcaaaagaaagggaaggtactgaggagaaaacggtaagcggaggtctggggtgggatagtgcgcaggggttcctctgaccgggcggcgggacccagctgccgcgcaggtaaatcccaatacgcctggcactggggttctggacagacttggtctaaatacagccacgtgctcggggctgctgtgctccagctgtgcgtttcggagcggtttgcgcgcacgcgcacgtacacacactcacacgggcgcgtgcctctgtcctggcgctggggcctgaggttgtccaagcagcggaacccccctgttcccgccggccacttgatgatgtcgctcaaactagatacggggtctctctagtcaaggagggcgggcagacagaggcgcccggcttgtgggtatccagccccacgtaggggaagggctcatagaggggcagagcccagggagaagcgacatgcccccggctccgtgctcctcttcgcctatcggccgggtcacctgtcagccggtgctctctcggctggctccccgtccctcctcgctccccgcagccacgcaacaacgcgctgtcagcccgagctgggcgccttggcctctttctggtgccccagccctgcgagccagggctcaccccacactgacgcttccaggtacaaacaccaccagcgccgttattccagactccagatccctgccttttccccccaccgagcaaagacaggccggtgtttgggggtggttgttgttcttttaaaagtatattaaaggatcattggcgtctccctgtcaagtcattacgcctttatccccatcaattaaccacacctcagagggctgctattaagagctcaaatgagctgcaaaagtaggtatcccgtttcaggcagatgttgttatctcccgctgagaggcgcggccggcggggccggatcctccgcttcccgcgactgccggagtcgcgctggactaggctgaccgcgcagggcggcgaggctggaagggaggtctccgcccgacaatgcgcaggtgccagaggagccaggaggagtgagaagcgccctagacccgcggcctcaagcgccatgcacgtcaaggggaagtgactccggagttgtgccaggaagaacaccaagaacgagctgtgcgtttttgcgcagagaagtagtcttcgcaagaccgcagctccctgccgaaggcccagaaagggagtgcgggggagagggcaaactagtgagtttggctggcagtgctcccccgacacaccccactttcttttcctgccactccagactccttcccggcagcgggcctccagaaccccttgttggtaaaggcgaggtgctgtggggatgcaggatatggaattagggaattcgggacggaaacgtagcgtttaggacaaaggggattcactggggacttccgcggcctttgcccagatgcgcctttccaccctttctcactccagtcactcccgaggacttggggcacgactatcacacgcaactgggagatcctggaagacggaggaaaaacgaacaaggggacatggccctcactgcagtgacagggctttccttcagtcagtggccacaataaatttaaccaaggctaaaggagattaatttcccagcataatccaattaaaagatttctaaagtaatcttttgcgaaaatgaaaagtgcgcgactaaagaggggactggttttgatgacagtgatttatcgcctcagcacagcacgcacgggacgctgtctctccaagcgatttgaccagagcatcccgtcctcgcctcctgtccaaaccttcctcttcctgaaagacagccatctatcacgccaacctgggcaggagagaatgtgcaaggggctggggcggcttacaagcaccacagacctttttaagtgctattagatttatggtctctttttcgacacccatccagagtaattagcacatatgttctaaatagatgatagttttgtgagcaataaagcaattacccatcgttggagctgacagttcctccaactaaactccaaccagcagctaattggaaaagtcatttcagctccattgtctgcaattagtcctgctaaactactacaccccaactagctggtttgagtttaatttattcaatgttgtgtttgcatggacaagcctttgccacgaagggacttgccttttgcccctctagactgcgcccagggactagaagagcaagtgggagtgagcagccgatatctgggggctgggatggcccccgggggaggaggcacccgactgggcctcagcttcaaggttagttgtccagcggctgaaagcctgcagagaaaaccattgtttctcctgctagacagtaaccggagaaaactgctcagttcatgctaccaaaacctttatttaaaaaattagaaattgtcaccacagagaaagcgactgggttctcaactcaccccttgttcacacatccagtcatgaccctgggccaccacatcatccctaaggaataaacatagagtcagaccgccaaaacagaaaagttctgagccctgggggagtgggggacaggtttcaactctgggagtgattcgtggaaagaaaagaaaagaaaggtcaggaagcccagcctctgccttagccactctgagtttaaagccactttccccttaaaagtggggtttctctgtgactttgtttgatttttttccccttcctttcttatattttttttcttcctttctttctaaaagttaagcccaacaggtccaggatttgtgcacagtgagtggaaaaaatgtgttaaacgtcggtttgacgccccaccggagcttccaaatatccagcggctgggattcttctacttaatttaatctttattggacagggcggctcctatgctcctattcactaggaaacccggggaaacatatccgttggggttcagaattgagggtgggaaggagaggagttaaagagggattaatcctcccccacccaacttcaaactttagaactgcaatcgcctgcagcctgggggggtgtcccccaagtcccagccctgacagcccagggtctctgcgatctggagccagaggaagagaggttggcaggttgagatgggaacttgtatccctagtaaccaagtattcccttgatggaattttacattaaagtgtcccaagctctgggagcaatgagaattttacttagaagaacatggggtggggggagcatcctcctcttaggaggtaaagcccagtgctttcagtcctagaaatccaatgtccttttctggattatcattcatattaaatgtcctgggagatgtttttctttttgaagtaaatactataacaatgcctggaagacaacttggacattttaaccagcatgtgagacttcctaagataattcctatttcaaataaattatgataaattgctcagcttcaagaatttggagacgtgtctatagcatgtaaaacttttaaactgcctaatgtcaggctcttattttccactatttattgtattttaaccaatttaactccaagcaaaaagaaaaaattgtggggagaaattgaaagtaaaggtcttgtcttgccccattacctcccacctgtcacacaatctcctccccctgaagagaaatcctcctgtcactgtgacttccagttgaaaacagaaaggaaataagatgacttctggaaaaagctgtccattgtgttcttaattgtttgcttttttttttcagtacttaaatatgcccagagagtgagggcatgaaaaagctaaatgaagagtcagctgaaagtatcacctagactgcttgttagagaattctaaggtagacgtgtgtgcatacttatgcatgagggtaaaataacctacctaatcatcgccccccatgtatgggaaatattgacatatatatccatgaactgaaaaatctttaagtacatgtgtgcagagattcagttctatgaaagctcagctagctgtccgcatgcatgtattcacttctggagtaaaggcatttttgttgctcccatagtttctttccattaagagcgattagatgatgtctattcaaagttgctgatccagagagaaaataagagtagataaaaggagatttcaagtgacctcctcatccctttcacaccaacctgagccctagaatagccaaggatcaactaacacaaaagccctttcctttctcttttcagcttcagaagactttatgcaggggggtaacaataaaacatagaacgatccccgagttttgttagatcatgcattcagaatactttattaactccccccaaagatgggctaggtttattttccacctttgaaatgggtaaataaaatatatatagcataacaaagggcataattgtttactgttctattgcttatatcagtggtgtcctatgcttgtgcttttttttttttttcatttaaactttagctaaacctcctctctcctcaacgatggaggacattgtaataaatatatctttccactgacagtttagaaggaaatgttaggtttattatttagatcaacgttctgataggtaaatacaattgcaacatgactggtaacaccagcagacctgctggctttttgagccaatacttttccactagtttatctcataggcagtaaagaaagtgacattaaacactgaaacatattagagcagtctttagtcagtgaaatatccaactcagatctacttctgatgggctaatcctgtagtagaagaaataggtgctctgacaggtaactattaagggaaatgattatgtagagcagttgattgtattctcagggtactccaacaaccttcagactcatttcaaaacttcaactttcatccaaacctaatccattttccctggaaagaatagccatgcggttttattcttcactcaagctgggtatttaaaataaataaattttataacataaaagtcttcaattatttccttttttctttttgcataaatgcatttagatagctaagacttgatttttataaaaagtaaatatttggctctagcttcactggtgtgctaagaatgattgtcacttttcctcctctaaaaaggctcgatttgcatccaaaggtcagtgcttgctctcctgccgtccttcctcctgctgcttctcctgggccctctaactgggggcctaggccaaaaggagaagtgcttcccttatctctctttttcaaaacacgtgctttaaatgaccggtttgagatagaaaactaaactaaggtacagcacttatctctgagcatttcgacccaaaggtgacaaagaagaaatgcctgggctaccagagcgatagtaaaccctggagtctgttgggttcatggtttgactatatgtgcacgctaagggtaggcagtccaccagaagcctgactcctaacttggcctatccacctggttttttgttgataaaggcagaactttttacaactaggcagccacaatataggctgggttcagtcttgggggtaaagatttctgagataggctggggtttagtttgtttgttttggttttgtgttttagtaatcacaaaacattagatgggcattcctgcacctctctccaccctttcttccaaaagatctgtgtgagaccattttaaatacatcttcaactatgtccttcctggctttaatctcatgccaggggagactaattgattcagcacctttcaaataagctctttgggaaaggtctgcagcaagatcagaggcactgacctttttctcaatgattgcaggcatgttcatctctccagatgggctcgataaaacggggttagttctgttctgtggtcttgctaaacagaataataccatttttaacgattttgaggtagggaagaggtataaaagagaatttcctacacatatctgatcatttgtagggtcccatggctcttgaactagatttagaaaatgtttttacaaggccacttttgttcagtgtgacttaccaaaaagctaaaatgaatgactttcgggagaccaagatatcaatatcaaaaaaagcccatagaattagtgaaaaatggttcagcctcgtggtaagaaagatatggagggagaggatatgttaacagacagacagtccgcttagatccggattctggggcctggaacgcaagtcaaccctgaatgtgcagccaaaccgatctgtgcttctcttcctctctcaccagatcacaatttactgggtggcaagctgggagagatcaagctttgtctggtatgtcttttaaaacgtgattaacgctgagcttgatgctagcagcccgcaaggggtactataggcttacagcctaattcctttccccaagcggagcggtaccttctcatcgcctttttggggaactacactaaagatctagtgtgcactgaacaggtctgtgggaaccaggaaggcagaggaaggaagggaggctcccgggagcccaggccccggcaaggcccttacagttcccagacccgccaaaccgaaagagagaccctggagagggctgagcccctgtgggcctggctggaggcctcgggtaggatgctgaggcaagagccacagcggtccgagtccaagaaccacgtccagactcagcttaaggttccgaggtgaaaggcctggcctagaagggagggagagagatctgaagaagagggggtgggtgaaagaaacgtggacactacaactgcgttttctgctcctgcagctgagcgtgcctggacaagtatgtaggatttcccaattgggggatctaagtactctcgaaaactatgatcagttttctattaggtaccctaccccacaacaacagatatcattatttcctggttgagtgtgggtcgcattaggcccaggacaagtgtgccaattgggaccagtatcaaaagagagccttgaagaaagaaagaaagggcttcccaggaactaagctgacctctcagtgcctctagggaagacatttttgctggaggcagggctatgagcacaagtggggcgccctgtgggtgtgcaaccgcggtcggggagcacaggcttccgaagagaaactgagctctaagtgccactcaggccggacgagttccagagggggacagcgccctcctcgaaaagccttggtttctccccgccccctcttgtgacagaaagttggcaaggatgccccgtaggagtgcgagccgctcccctcctccgaaaagccgcgggcttccgctgctccgggcatcaccaccaacagcttcccactcccacccctgggactaggacaggggacttcaccctcctccttccttccggaggagcccgcggcttcgcctgaggcctcgcgggcccaacttctccccaccgctagggtcacgccgggtcccaggggcctctttcaagtttgaaagctctgtgggggcacggagagcccacagtaaggatgggtgggcgcctctgctcccgggcaggctcagctgtcatcccgtctcgccttggccctcacctacagggcctgaccccgggccagcccagctaggcaaggcctcctcgcttccgagaccccccagcccccgggtgcagtccccagcatcggctgcccccgccccccgcgcgccctctgacgcaaacgcacgcccctgccccgcacggaggaaagcgctcttgttggttttaattgagcctcttcctttcaacacaccccctctgtccccacccctgggaggcgaccccctccccgcccccagccggctggcagcggcgcagggagtctggctcggctgctaggctgcgaatcccggtgctctctcgccgccgccgcaggttgtctgctcgggagagcggctcgatgtcccttttaatccgctgacactatcgcccacatcagacaggcagccatcgatcgcgttacattaggggatggcgttacaaacggcgtccgcaggtgggcggctgcagccaagctcgccaggttcaggccgtaaccaggcaaggcgcgggcacaagggccagccgggccggactctgcagccggctccaccgcgggtcgcgctcggcaccagcaggaacagccgggccggtgttaaacgtgcgggtccccgtcctccgcccgggcatccgtttcccgcctaggagagagagggaatagcgggtgggggtgggagcagcctgttttgaatgtggattgctgctcgcctggcacgatcctcccctccaaggaggcgcggcggccgcgatcctcgccttagcgctacggcgagacagaggccgagcgagggcaactcccgagcaggccccgaagaaagttctcctcgtcccgccctggctgcctagactctgctctcggcctgcggaggccgtgcgagccaagactgcctcccggccctgcccgttaccaaccccaagttcaagagaaacgacaaccattatgttacttgcctggtgaggcaggatttggccgagtctcgtttctggtgcccacgacgcacggtccagggtccgagggcggctgggccggcggactgggcatccagtgtgcctgcggtgccctggcgctcgctgtcgctggtctcccactcccttcgtctctctccgcgttctccttccctcgccctatctccctctctccgcctgctgcctctgccctcgactccctgcctctgactgtatggggagtacgatttagaatctgtacatagaaaggttttcttttctttcttttcttttggtctattttaatcgtgttcgtttcaccttttaactgaccagaagacgggagcgcgtttgcgcgtttatttgggcatagggacgagggcaaggagcccctgctacccccagtcgcctcctcgccatcagctgcgtacaatgggccaccgctcgcggagtgcattgacagttctccattattcgagctggaggggctgtggggcaggcacgggaaaaccttttattctgctctttaaaatcatcgctcgtcactaagcggtcgccgactcccgacttgtaggctggagagaccaggaagcgcaaaacgtcccccaaacacgcagtgcttcccaaacccctccctggtgagacttaaagtgagaacgagtattaaaaaacaaaccctacctctgtcaatacagcgtggccatttacttccacctttacctgagggcgtgttggcgctaggaatgctcgagctgagacaaacttttacgccctcgcgagtcgaggggcgggcgggcgagcgcggctcccacccccggcggcggcagcggcggctttgtcactccgcgcggctccgcgcccgcctgagcctgcctaggggagcgatctcaaaacgaggggggtgcgagtatgcgattggagaatatgtaactaatagaagtatcattttcccccagtacgatctttcaaggaaaaaaaaatccattgaaagaattttcaaagtgctgtcttcgtttggagaaaaggcacaggctgcctgcggggaggggaggagggactcggctgtgtgccgcccgggagcggctcccgtccgctaggtggcagccggagccagcgattcctgcaagccccgccgcgggacccgctcctcccgcctgcccctcctcccgcgaccaatcaccttcaggattcaggaatcggggtctcggtctctctctctctctctctctctctctctctctctctctctctctctctctctctctctctctctccccctctccctctccctctccctctcctctctccctctccctctccctctccctctccctctccctctccctctccctctcgtctctctctctctctctctcctctctctctctctctcctctctctctctctcctctctcctctctctctcggtctctctctctctctctgggtctctctctctctctctctctctgggtctctctctctctcctctctctctgggtctctctctctctcctctctctctctctcccctctcctctcttctctctctctctctctcaatatctcgcgcgctctcctctctcctctctttcctttcctctcctctctctctgtctctctctctcctcctcccccttttctctctccctctccgcctccccccctctccatcttctcgtttgtttgctcttttcccgggactgacttggccacactaatctccccccaccctgcaacaatatggggacttactactgttttattaataatgattgaagcattgttggagtttggaacagccaggtgataaaaaaaaaaaaaaagaagaaggaaaaattggattgattggaaagtttatttttaaaatcatctttgggataaataggaacccttgattccgatcgaatttgtggcaatagctgcaaattccaggagtgtgctttgtcatcattaaaccttttaaaccaaggtatactttggattaaaaaatagggagatcctaccctgtttctacttgtttctaaaaaggatataaaatgagcagaatccagacttggattgtgcttatatgtgagagaagaaaacaatccaaatccagtatatttcacaaatcattaaaatggtgggggtttcattcccattaaaaatttttccaaacattttcaatgacactctcttcacgctcataaaatctaattttaaaaacttttcagaagaaatcaaaataatttccctctaattctccttttgcccatcgctaggcgttctccccctcgtcatcccttccccctctggggtgtgagcgtaagtgtgtgtgtgtgtatgtgtgtgtgt

SEQ ID NO: 406 - DNA, 152820 bp, Homo sapiens
  source 1..152820: mol_type = genomic DNA
tctaaataaattaatagaccataaattctgtaatgtgaatctttagacaaagactgctaaatctatcatctgatatatgaagttttattacaacaaatgtttatatattgagttaaaaattatctgtacccatacacacaacctgcatttacttaatttaaaaggagtgtcaatattaaaattgaggattttggccaggtgcggtggctcacgcctataattccagcactttgggaggccgggtagatcatttgaggtcacaagtttgagaccagcctggccaacacggtgaaaccccgtcttgactaaaaatgcaaaaattagccgggcatggtggtgtgcccctgtaatcccagctactggggaggctgaggcgggagaattgcttgaacccgggagacagaagctgcagtgagccgagatcgtgccactgcactccagcctgggcaacagagcgagaacccatctcaaaaaaaaaaaattgttattttgttgttattgttgtttttgaagacagagtctcactctgttgcccaggctggagtgcggtggcatgatcttggattgtgttcttccagggttgcagagagaagtgcaacagcgtctcattgcaacctctgcctcccaggttcaagcaattctcccgcctcagcctcccaagtagctgggattacaggagtgcaccatcacacccagctaatttttgcatttttagtagagatggaggtttcaccatgttggccaggctggtctcgaactcctgacctcaggtgatccgcctgccttggcttcccaaagtgctgggattacaggtgtgagccaccatgcccagcctaagaataataactttataactatgaaaaatgtgttacatattcaccattttgccagcattaatctcaaagcataagttttaccttttggggataaagagatagattgtgttttagccatatgaccaatgtagaaacaagctaaggttaactcctcatctaatgaataggcccgataaaaaagttggttgaccacaacatgaataaataaataaccataagcttggaaatgctacctgtagtatttcagagtgtcgatcacatttgtagtcatcacttaaagaattaatgtctgccaatgttatcatctaaaatgtatttacagaggtcagaagagctatgtctgtcctcctctatgcaaagaggtgatgacatcaaggggtatgtcacaagccaaagtttagttagcctaagttagttagctggtttgcagtttttatccactaagtctgatcttctgacccctcagttttacaactttccactctctgtgctgcatagcacctctccacttctgagttaatcatttctttgccattatctggcaagaattcttatctcttttgctgtcactttataacagggtcctcttatcaacctgcatagagtcatgtgatgagtcaaagcctatcaaaagtttccattcttctgattagaaaccatcatgaaactggatacatggtttacagcaggtcactaatgttggaaaaagtacagagtccagggaaagacttgcttgtaactttatgaattctggatttttttttttcctttgctttttcttaactttcactaagggttactgtagtctgatgtgtccttcccaaggccacgaaatttgacaagctgcacttttcttttgctcaatgatttctgctttaagccaaagaactgcctataatttcactaagaatgtcttctaattcagatactggggatttacaagagtctttaaagcacggacttacacctattggtaagtaggagtttctctattgatcatctatttattctgctactacatacatataatttaatcttgttgatggattttgcattttaagtcatggcttttcctattatgtttattaaaagcacacaataagcctatgtatatatatcacacatttatctttcttgcagttcaaaaaaagcaaatggatatttcaacatatgaatattattcattatatctagtgtttactggtgtcattctaataccctaatcagccagaaaatataatttatactttatcaatttcaactttaatattttctgataatttttaatcagaaataataagctaaaatttgaacaatttgaaacaagttaatcatattgagtgatcattgatcaaactttaacagatagctgtcaagtatttgttacttttcaacccacacaaaagtatggtgtcttattctctgcttataccgtaaaaaattttcattttattttcctggggaatgaaagtcatgcccccacctccaaaaaaaaaaaaaaaaaaccaaaaaaactagaccatcattagtaaaggatttgaagagctactgtttctcgcaacaattagtatattttgtttttacaaacagaaataagtaaataaagctactattcatttaaaaaatagagttacaaacttatgaattttatagcaagactacattcaattaattctaaaagtaaaggactgaagggaagtgattcccagtgatctgtaattatttgtctgttggaagtcaggcccttctgcctttccccagtttttgaaggacctgtgccttttctggcagcatttgcctaggctttcagactggaatttccctccgaatttgcaggggcctgtcatgagctctctgagtctcagctccattataacaagaaagaaaatcaaggcttgagtttttcctcttttttccttcctagtcagctgactccacagaatgcagtggagtcacagattgctttttttatgggccaactacaccctaaagtatatcacttgaggaaatgtttaccaaaaatgttctatacttacgaaaaagaaaacatggggaaggtaagcagggtgtaacacacaatcaattgttctgcagataacacagaaaatacaggcacaagaaagatgagagagcagcacacaaccatttcgcatctttttcgtcgggcagaaccgccgcggtgcgcaggcaaggagtccttcccggcagctccgcgcagctccggttccgcgtccggggccgcagctagagcgcgctcgggccggagacgcggactgcgcgcgcacgggggacgcgcgctcgggggctcgcgcccgcgcgggcggtcttgggctcctgctgcgcgcagccccagctggccgctgccaaaatagagttgagctgggtcgggagaccacgcacgccgatccctcacagtctcccccacaccccatgggtgaattaaagagggtaaggtaggggaaagagacgctgttgcacttttctctgcaaccctggaagaactgtgtttccagctaccgcacgcgcaactcacatcgcaagggaccgaggcggtacactctgagcgtaaacagagaacacctgcagctctggaatcggtcccaccgcagagggctgggaaccggaggactgtcggtccagcccataaggggctgctggggactaaacctcaagaaaagtaccgaagaaggctctcccctggcctcagcgagactaccccaacatcctaaacctgtgcaggcacttccgggcgccggattccgggataacaaaattccagtcaatttgccggtaaaagagacctctttcaggatcttgttcgcagccacccgccccttcccaacccaagcacatcccctccgcctcctggtattgcagccccgcaggtggttgtgaggtgtccgcacctgcaacatcttagtgaccctgaggcggctgtggcaccgggagacaatctgtttacctcgtagcctccacgagggtgctaacggtcgttcccagggtgaatggctggacggagccatccaaagggctgagggagaggaacagagggcggtgaggagccttcggactgaactattggattgaagggcctgacccgattcctgagggagagatgccccttgaatgggtctttctgattgcccagggtagccccactgggaagaacccacgggtgcagctgtagagagtgtctgagggtctcgagggtagctttcagatggcaaattgcaagttgggctgtgttgagtggttcacaaaaccgagcccggtgtatgtagacatcagtcagggtttacaattctatatttaattcagttgtgttgtactaggaaatgagcctccttttgtttaaaaagctgtctccatggtttttaactaggggctacatcttgtatgcacactgatggttacatgaaagttttgtatagatgtctgtgcttgtatagaaaagcagaattaagataaagttgttccttctgcctacctgcaagataatcattcattgtagtgtaaaagcagcacactcaggttataactagattgttcccttaaagttaactaactctgggacactggccagactcttggtttctggtcttggtttacttctttctcccaagtgggatgattctattgaataatatgcagtactaactttagaagctttttatacttacctatatcaagaaaagagccatatctgtgtggtaggaaatgttatacataaaacaaatatttattgaccactcccacagtgcccaatattatgctttgattcatattaaatttccataattcttcaaattaactgcatttgcagaatattttatgcactcagtataatattgcatattatccacagaaggttatgtctgcatacttaggggtacatgatacacagtgcaaacactgtattgagtctgtaatgtgagtcttgctatctggtcccctgaacactctgagtctgattttatttcagtgataacctccagcaagctctgtgctcataaggatctctgaaagtagacgtttcatcagcggaaagtgtgatagccattatgtcaccctaacctccagcgagctttatttagaatgccagccacacaagcccatgttctgattctcatagttggggcttaggctgccagtttcttctatgaagctaaactctagagcctcccttctttccatgcccgagtccatctccaaaacagtgcttctcagattcctcttttctggcctggatccacaggtagtgaccagagttaacagagttcttgggccaggcacagtgtctcaaactggtaatcccaatactttgggagactgaggatggaggatcacttgggcccaggagatccagaccagcctaggcaacatagtgagacccagtctctacaaaaaataaaaaaataaataattagctgggtgtgggtgtggtggcatgtgcctgtagtcctagtgactagggcttgggggttgaggtaggaagatcacttgagccagggaggttgaggatgctgtgattgtgccattgaactccagcctgggcaacaaagtgagaccctatctcaaaaaaacaaaacaaaacaaaacaaaacaaaaaaaggatttctttttctttaacaccttttttttttttttttttttttttgaggcagagtttcactcttgttgcccaagctggagtgcaatggcatgatcttggctcactgcagcctcagccttctgggttcaagagattctcctgcttcagcctcccaggcagctgggattacaggtgcacgccaccacgcctggctaattttttgtatttttagtagaaatggggtttcaccatgttagccaggctggtcccgaaatcctgacctcaggtgatccacccacctcagcctcccaaagtgctgggattacaaatgtgagccaccacacctggcatctttaacacctcttctaacaaaccaagagagatttatagaggaagggagaacagaggcttgttaatgcttctctcctttacttgacccctctaccagacacaatgtctaggattatcttggattcagccttgagcataagttgagctagagaagggcacattgtcagacttccacctacaggcccaacccaatccccacccccagggatgcactaggcaggcaagacaacttcactccgcagctctagagtctaccttaggatagaactagttctttgagttgcacttcctcacgcttcaccttattggaacagacttcttggaaaaatccagttggcttcaaggaacttcaggagggcattgtgctctggggaggccctggggaagtgttgaaatgtgaccaatatgatcttgagagatcaagcttgagaaaaccatgtgaactggaactgaccaggcaagctgataaaggttgtctcttctttagtcttttgggaagctgttatgtatgtttttgtgtggttgataagtaagaaaagatatttggagtgtaacttttaaacaccaaataacctgaatgcagatgaccatgagcacttatatgagcagttttatctggtgataatgtaattgtccccaaggactttgtcaagccctgcaagacaatcaagttagcaagcacatcccactggaaggtgatcctagaatggttagtgattccctttttactttccttacagaatgatgagtttgagtgaagctaaggggaaagacaaaggggaactgatatatatatatatatccagcgtaatatatttctttcctggcactgtctcatttaactataaagtttactttgttaacccaattttactgattaaaaaatggaatcagaggtcaagcaatttactcagcttgtcaagagaatgaactgtaaatagaacccaagaaatattctgaaatacatactctttctccaaagtggtaaccacttgttcttgttgatataaaggaattatgatttaatacaatgttggtctatgcagactttcctccaatggacatttcgagcttaagaaacatatttgtaagtggctttttaatcttcatttccattccacggtagaaaccatatttggatccttctagaattcagaagggtggcacagggagtggtgtatggaaagcagagtggaaatcacatctgggaggactgaggtctgagtggggtgggacaaaggcacttctggtcccctactctggagtttcctggaaaggatctctggagtttggatgaagtttagcttgtgaatttgtggtgtatggtaacaactcgcagggttaccaacagatggtgagaaggaactgagaggaaattcagagcatgtacttgttatagagtcagtgagtatgaggagggcagggaaatcactcaaactgagtgactgaattagatagcataaacaaacatactgttgtaccatgagaggaggggatagggaaagacaatttaggtgtcaattaaaaaaaaaagcacttttgacaaacccagctgtgcctcttgcagtgagatatgctagtcccacacccatgctagcatttttcacggtaagtgctggattccttgctcagggtttggatgcctgcagcctctgcttcccggccttctgcaagctccacctgctccagcggcctctacaggaatggaaagaaaattggtcggaatccactgctgggtcctggaatcaacttcccagtttccagacaagaaactctggagaaaacaagtgaatctctctcaagccttggcacacactgtacaccatctcgtaatcgcgaaagttatcaccatgttggaaaagcccacgcccttctaattgtgcaacctctgtaactgcccagaccataacactttccctagttccacgccccatgcttgagtgtgacggtaccactgttaagtcttgcctttccaagctcccactttctttgctgaccaagtgagacccaaattgctggactccgcacctctgcggtcccggcactctttgaccttaagaatcagaagctcaggcaggggcttttctgaaggaagaagtttggttggatccatcccctcgctgcaaaagccgaggaattctgaagcaatgcaggatgtttccccttccatcaagaagtttccagtatcgccggatacatttaaatggcagcctagaataatctcgtgctaaggattttgttcctgacccaggttgaagcggaggagagggtgtaaaggatgcaactgcaagtgttcagctagtttcacaaggtgctttgtggcctactagcgccgggatcgtcgttctgttggccccgaggctggacagaattgattccaatggatggagtcccaatagttttgaactggaactggctcaaatttccatttcaattacagagaggaagagatagattagaccacctacccgagattatttcccctgccccactcctttcttaagaccggatctccctgttacattcttctaagggcaccgactataccctggcggggcactccaggacccctgggttgggacaacgtgctgtaaagaaaataagtgaaaaggttcttcagtgaactctttttatacaaagagccgtagattccgatatccaggccaaactctccaaaaagccctcctttcctctggggcaagggtgggaggttgcccgggggggtgggtggggggtaggttggattacccagataattgcttcggctttcgttttcctccgcgataaaaaccgcgccacgccagatcgagatactctcatagtgattgtgaatcaatcgccatcctgctctaggggctgatgttgatgtcttaagtagttattcacacgtgcagcagaaaggctttttttttttttttttttttttttttttttaaacaaggcacgactgctcacctattcaggtttgcttttttaaagcttcgatcaacacgacgctccctggtaattcctatggctgtactgaaatttaacccgtctgtttctaatacaaagcgctcgggatgagggcgggtggagcctacgggcgtgggcgggtagcccagccctctgagccagggaatgaaactggagttctggctaaacttttcagagaaaggcaaaagcagcttctgatgggtttttcggctgggaggggcggaaaaattaggcagacccggagctcccgtaggctgaaaaacttgctcctcttccccctcgggctatcctggcctagtaatggagatctgaaaaaaatctagacttctttcggggtctaaaaggtagatatgtgggacgaaaaaagtaattgtcctggtttcttaaaaagcaccaaaaagtgggaatggaagagaagacgggagaaattgtttcgaaggaggaaggtattgcaagttttgtgcaagtttgggtgggtcatctacccaggcgcgcggggaaagatgtgtctgccacaccttttgcgagcccaggaaacttgaaccgctcctgaaaatcctgatattttttcccgctgcagcccgcacgggtcaagcgcgcgggggctgaccaacactttccaggtcaggtcgagttgattgctcccagctcacgctccgaaatgcggtgctgaaccacgggaaggagggggtggggaggaaggcaggcagttgcatcctcgcgagtggggagtgcgaggcctcctcagctccagccagctgggtgaatggggcgcgcacggccccgtaacgccgagcgtggataaaatatgctaggactgcgcttctccggctcatcaaggctgcgggagcctccccgagccatcatccttcgtaattgcaaccgtcaatcaacactttaagacaaagtcagaaccgggaagggcgagccctggagacctgtctcgtcggaaagaaggaggtggaggggaggtgggggaaaaggagagaagtttgccagaagttggcagagggagtgcaaagaaattgagaacgcgcaaggtagttgagcagagctgtcccccggtctcaccacagactcccaggcctcccgggttctagtctctggtctccgccaccagttacaattcccgcagcggtaagtacggggtgggttcctaagtgtgcttacactaagaggtacagtggcagttgctaagatgtccccggcggaggatgagatgcgtctgtccacccgcggtaggtgtatttatgggtcagtgcagaccaccgctggcgccggcgtttagaccacacagacccggttccacctacttacatctcaactgctttcccttcccgcagccacttggctgtcttcatattgtggcctcgggaacccagaaccattctcaaataacccatcttagacaccgcaaactcgggttcctcctcccacagcttcctttcggagagggctttctgggggacgcccagacccgtccaaggtcactgagctagcgggtccccggcttcaacaggggtcccttgcccagcagaattgaagggtcaaaggaccagagtgagtgctcagagggaggagggagttctgagggagaagaaagggtgcacttggagggcagtaatgagcttgacgctggaagcctggtgccgccgcccctgcctctgcctcttggatggagacccagctgcttccttaaatcccttgcagagctacctgaggaaggtttgtgtgccctcgggtctctggcaagaatcaattccagtggaagattccttgccttgtccactgctggcggggatcttgacatccttccaggggatctgaaatagggctgcccccagggagcgtttcccatcgtcgagttaaaggcctggagcgccgagggcttaggcttctgagctaggagttcccttggttcttaggaaaggtcgttttctctcgctcgagactttctgctctttcagtccccctccatttcgctgctacgcttaggttttggcctggactagactttcaaagcaaaggaaagggcttccctccgtgatacaagctcctgcgttaattttttaaagcatggatttttaaaacccagtccccagccaccgttccctcccgcacccctcccattttgtgaggatttttctttcctggaaagtccacctgtggagagataaatgagtgccagctggccttttgccaccaccactctccatctttcggggatgtggtgggagggtagactggcatggaccaagaagtcgctagtgtggcctaagcaagtcccttctggccctggcagctggcgttatgagcatggtcacaaagcttgtctcactaggtcagcctcagcctcaggttcagcctcaagccaaggcagggtttcttgatacactacaatttcaaggtcctgtcagaccctctttcaacttctttcaactctcctaacttcccccggcttcaccaagcagaggtgaaatcaccaccacacactaggggttggaggtttcctcttaggaccaagcgtttggagtcctgcatccttgccatgctagggtctgggaaaggtgctgtatcataagtgcacccataaattcttcgcattgctgtgggaggaggttcttcttaattaaggctttgaaataaactgattttcaaagttcacgagcaaagcagggcaaccactgcagtgagccctgaaactgactccctttctttattttcttagttctcagtgatacttaaaacaactaggaatactgaaatgtagtgacagtgatacttgatactatcacaaaaattggagcttttggcaacttcagcccacttctccatacaaactaatggacaggccttcataagtttaaatgtttccacgaaacctgaagttgctactaaagctgaagtctaaataactttgatcctgaatatatattgaagagcaaaatgacaaatcaattaagagtcagtagtacctgaattgccaggtgtgggtgggtgatgaacaacccattttatgtacattatgcactgcaaagattggaataatttccaagtcaccaaataccggattgggcagtttcaatgtgtaatctctataccattcaaatagaataaacttagatcttttgagattcaaattcacccccttgtgggtggactctgataattacttcgttgcacagcagattctaaatatgaggcatttcgcatgcagtcaggaggctggaaagaatgtttttcatcttgttgggaggagatctgaaaactttgaagatgcggctgggctggtggtcgaagagcttgcgtaacagatggttctttaaaacattttttaaatgctgggcctcggcctcaagtggatggtcccatcagacaacagaatgaaaaagtacagcctggactgatccttgtattccgtgtggaaacacaggtcactaaaactggaaagtctgtcgcttagatgatcttgggctccagtcgagggtcttttaaaagtgaacgaagggactagggagcagactggggaaagaggagtcgctgccccttcctctaattctatgagtgagctcttggcttgtggcccgcctctcattgagctgaccctcggccccttcagggcgccggggcccacgtgtcgcctcttcagggtctcagtgccctggggagttgaagctggaggacccttgaccgcagaccaactctgcatgtaagaacggtcagctaaattttctcctttcaatggtttaagtgggtgtttaactcccttcatctcctcatccgacacactagcaagggcacacgcccacccgcgcccccatcccttcttcttgcttcccctcagatcgaggaaattgccgctctggctgcttctccttcgccgccacgctcagacagaggtcgcttctgactagctgtaagacccggctgcatttacatccccccgccccgggccagggtggggtgggagggggtgaggcggggtgaagaggttggggcaggccgggggactggagcctgagcctcatccttattggctggcggctagtgtccgacctgagtccggaacccgcgtccgcattcactgtcttcacccctcaatccagccttcccccaacccctggccctacttacctccttctccccctcgtcttcccccctgtccttcccagcaccgtcaccctcggggctgggaagggccgttctcggtcccgcgcggggagtggaccaggcaggagagggaggttggaacttcacaactccacacttgcgatagtgagcaagagagaggcagagagagatagggggaaggggcggagaggaggggagagagaagggaggcgagagaaagaggagagagacccctgccgatcctgagccagagggcggtggagggaggggaaggagtcgcccgagccgtccgggagcagtggcagcggcacagccggggcggcaatagcagccccgcggtcgcctccgctgcccgccgggagctcggcggttcacggctccgcgccccgggcagctgcgtcctcgccaccgccgccgcctgcgcccttgcggagccgaaccagagggccgggacgctgtcttcctcgcctccttttttaaccctgacctcctcctcgcagcttgggggcggctccggagctgcgagaccggacagggctcagaggtcctgcccggcagccccgaggaggcggaggcacgctccggcgaggcgagagggttgggttagcaggcatcccggtcgccccttccttcttttcgccggagttgaatctgtgctgcccgtgtccaggtgctgggcttccggaccgacacggatcccccatccccgcccgcggtcgccttgtcatgctgcccaaagtggagacggaagccctgggactggctcgatcgcatggggaacagggccagatgccggaaaacatgcaaggtaaggaggcgccgcgcggcgctccggctcccgctgcttccccacccccgggctcgccctgcaggcttcagcctcccgccccgcgcgggcgcgggagtagccccgctgggcgctcgcagccgcgggagtcaagccccctccccaggtgcaggcataaaagtttatggctcttgaacaatgcggggcagaggtttttccaagcaacgtctaattggccgcttctaattaaggaaagagaggcttccagctctatggcaacccaagcagggcagcttcaggctaaaggtactttagaataataagatcattctaagaaatggaatgtctcactggacacccgaacaggttctctgtcattggaattggtgtgtactgtacttcaaccagtactcttgtgtggagggaggcgacccagtctaggaaagtcaactacagaaagaggtgacctccgaaaggattgtcttagcgctattagaatacatgtgaccacaccaaaagcccaggcggacacccgcagccagctcggatttggacaattcaacattgctggcagaactgaagggaacaagttaccccaaccccatcccctgtacgcgtagtgctgagtgagttgggggtgggaggacagcggttcgtttattgcccccttttaaaatctgagatctgaaaatatggaggtcccattcgttttcccagctcttgattgccaacaaaaaaacaaatcccgctggctacattttctcctcattccaaaatagcaaccctatggcttgtattaagcccttcagaagtttatctcatttgctctgggccagggagggaacaatgctaggaaaagtcaccggtgctcttccatcctcgccccttccagggtgcaggatgtgcgggccggcgggcctgtgatcccggaacgcttcctgccatccccttgcgcgaacttgaaaggactgggaggtgttgagagcagagttcagggctggtgcactctgcggtgctgagtgggcggcgcgcccgggcgctcaggccgggggacctgtagtcgccctaccgcggaggggaaaatacgtagctggagggcgtgcgccgtgcgggttgtgatccgttaccccatcggtcatcctggggtctccccaagcctctaggtagggctgtgagagtcccctagagctgaagccccggaggctgacctgtgggtctggctgctatgggaacccggttggtccaaagaagcctttcttccgggcacctggaattccagtttagtgtggggcatcggggaagtggcgctggggggctgggttgggggacctcagccggcagctccggagagggcctacccttggggtcgctgggtgaggccggcacgattcttggctccaaaaggaaagtttctgcttcttgttctggcgcgagaagccaaagacttattttgagagcggagagagaaatgttattggtaacgttttctttggaaagttcgagaggggtcttctggacacactacctagtgcccccaaaccagagaagtagtttttctttggtgcctgggctcagaagtcgccactcactcagcccatggttcgaaatcagcatgggaagcgccggggcaaggcttcgtcggagactagaggcctgcctgtcgggaggagcccctgggggatggggaccccattctcctgcttgctctggttcccacctgggacgcctccgtaggagcccagaaagacgatccactacatggtcccgggacagagcagcgcgcccaactttgagggaactttgtgcgcctctctgaggccctagctttccaaggcaccgccgtccgttcttctttccctagaccgaaactggggaagagtgtgggcgcttctttgccccgatgagttcgcctccccaaacgcctacttcggctgcaccagagcatctgggaaactctgaaaggtgcccaggcctcacacagcagcgtctccctactcagcctctgtctttgggttttttcaagagagtctctacctcatgcctcggtctttcttcgatgtcgggtccccgaggtaggcacggagtccctctgaaagcagttgcctatctgtgcccctttggtgtaaagttagagtttactttgttgggggaaggggaggtagaaaagatcacagttgggaaagtgcgcttttcgccttgttcctaaaacatgcctcaagactgtcatcgcgattgttaggagagctatcaacgtctaggggctataaaggaatttctgaaccctcggcccttcccaaacccccaggttcctaaaaccctagtgggggtctcttggggctgggattcaggctggcaccgctgggaggacctcgcctagcatccctttattaatatttcacgaaggcaggctcctgccttctctggagcctcttttctcggaatgttcccaaactctggctaactcactcccctgtgagccatcctagggctctgtggcccgggaagagacgcgtcaactccgcgggtctgcgcgcagtccttagccgcaaagtgctgcaagtgacccccctgacggccctttccgaccgaagagctcgggaaccaaagagaaaaaaaataactttattttcaaaagaacaagtcatcactgcggcgatactgtggcggaggactttggcgatggggtgggggctatttctctttcctttttggtaaacaaatcagaggaaacttctgcccggccgtggctttccatcccccacctgccccaccccctgcaaacgccactgattaacttaaaacaaactcggctgcgtgtttgtgcgccgttgggtagcaggaggtagagcctaggcgagagcctggtgcgcccacgggtttcgccgaagagtgcccgggggagtgcgggcagggtcccggctgcgcagacctgcgggtgcccgcccacccgcgccccgcgctcccatacttgacctgtgtggatgtggagtctccgggaaataccggatcaggcacttcctggggtctcctggtcactgcccttcctgtgcatagtttgtcatctttttagctgcgaagacgccttcgtgggtctgcgtccggagcaaggcggttacccgatcccggcagtgagccgcgccgcgcgtcgtggcggcctgatttctgtttaactttaatagggcgatctcgaggtgtttatattttgctatgatgatcggaaacatgtgaggttcattacagggcttcaatactttgaaaccaaaacccttctgtgtgtcttttactcttctggtatttttccccgtacgggcgtcctctattttctttttccttctttttattttcacagattttcaaacgtaaggagatgaaagtatccagaatagaaaagtactgtcaatacggaactgaatgtttcgattatctaacagatctgaaagttgggagcctcaggctgtttagttaaagtgggctgctgctgagaagcgggtttctggggcttcagtttctctgtcggacagagtttgcaaattggtgctgctgtccctgtaagcaaggtgcacttgcagcaaaccacttcaagagggagggaataaagcctgcgcttgtttctctaccttaggcgaaggtgacattttggaatttaacttcatagggatttaaaagaaattctaaactgtcaccttatgcaattcatgtctctatttgttgctttgtggagttatgagacttgtgtttaaaagcggtcagtttaaaatgttaacaaaagaagttggaattgtttgtggcacatggaattatatgaggtccatgcttattgatgacaaaagatgttttacttgtaaaaatagttcagtaagaccttgctaaaaattgtttttattttatattttaccatgtgatatttgcccagcaatcaccaaaatgctttttgttgcaggattaacacctacatgtaaattaattgaatatgtgtatacatttctctttttgtttcagtgtctcaatttaaaatggtgaattactcctatgatgaagatctggaagagctttgtcccgtgtgtggagataaagtgtctgggtaccattatgggctcctcacctgtgaaagctgcaaggtttgctcacacattgctacctgaaaaatataatgtccaacaccaaaataaaccagtggattacttcttttaagctaaatttaggctccttttttaaagactcaactaaaaatgagggagaaagagagagtcttagggagatgattcttagaagtgtgtgtctgatttagttcaaaaggcaaagaaatttatgctgtttagaaaactttgccagtctcatggttctaaaatactttattgtagtaaagtgatatagctgtagaaagacttccatttctaacagtcctaaatattgattttgcttgacttatatatatttaaagcatcgttgttcttgaaagggaatatgacaaactatttcccaaatacattttaacttcagagtatttctgtgctataagtctaaacattctttatccacagacataaaagcctaaattcccaactgtgtgatttcatcttgatttattccaaaataattttaaggattttttgaaatttatatcataaagaccaagaaatcagattttagtttttaatataataatttttataaatatatgacctatttaagtgcatggattttaatatgtaaaatatgctatattgttaccaaaaatataaattatactttaagaatttatctcaggactttttaatacattcccagtaaattcaatattcactatttttcaaagttttttttgtttgtttgtttttgtttttaagtggaaaactcagtacaattacttaaaccaccaccaggaaaatccctccattctctataacaaagtaagaatgtttctctttgtggcaagtgggttaaatatgaatactatcctggtaaatctcatattataaagctacacattttatttttgattaattcttttatataaaatataaggaaagctcataccctgtgtgctacaattcagctatctgtgatacatgctttttccttccattagttttgcctttttaagaacagttcccatacttgaatgtattccagtggaattatgagcattttcccattttactctttaaatccttttgcttttaactatccagtgttgacatttgttaaaaaaaaaaaaaaatctgaggtgttttgctattcagttttttccactggcattttgcaatggtttatcactgaaattatatcagactacttaaaaacaatgccaggacttcatgagtacctctatcaggaacatgtgggataataggaaaatagattaaaaaaaaatttatctatatagagtgtattttttctgactgttgggataaaatggtgggtagccaaatctccccaggatttgacgtaattcttcaagaataaaactgatgccagaaaaatctccaccatggcctggcacagtttgggaaggttgatgttgctgaaatgtaaaataaaccacagaaccacataagggctcaaatagtgcaatgagaggatttactggtgattttcttaaaatgaaacaatggaaaagacgggtgttagatttataatacgtctcactattttctctgtcttatagggattttttaagcgaacagtccaaaataataaaaggtacacatgtatagaaaaccagaactgccaaattgacaaaacacagagaaagcgttgtccttactgtcgttttcaaaaatgtctaagtgttggaatgaagctagaaggtaagattcttctaaagactactgcctattaaaactctccaaggacatgaactgtaaaacaacattgtacttatagcatggtaacattattttcccagcattttaacactaccgacaatactgtaagatctttctatgtttcatctgcagaatagtctgagtctcatttaatcatggtgaaatctactaggaaaaaaatttaaaatattagttgtctttcccctgcccacccccttttttttagtctggggagcagatgcattagacacaaaaaagggaaaaagatcaggttatgaaaataagactaaagcaatccaactgaaaacaagaataatttgtaaaactattaaaagtaaaatattctttgagtttttaaatcaagatacccttggaaaagtttgatttcaattctttttaaaagaggtgtgcttgtcacaagtgttaactactaatttcatgattcttaagagttaaagcctttaatggtgaaaaggagtttctcatgtaggatattatctttgatagtgtagaaatgtatttttttaaaagataatgactgaggctgcaaaataaaaaattgagaatcaggaaacatgaaaaataacgaactattaaatcattagcaaaggtctgaaaagaacaagaaagtggctcctgaaaagccacacttgaactttgttgaaagagcagaccctatactacaatgtacagattggcaggcagtaaagttaatatgtgactgctgtaaataatttgtagttcatggactactatggtatgttgctgctttctagcctctgacctgcttgctttccatggattaaatatactgcaaataaagcaataacagggatacatatcaccgatggtgctagatacaagagtgcattttatttgatcaatgaggcacaggctatttttatttggaacttttctgttatatggaactcatacttgatagaaatactaaaaaaaaaaatcatataaatctgctgaatagctaacacgcttcttccgaacagaggtagccactttggttattatgaggactgttaatgtcagtatcatttttaagagatcatgaaaggaaataattgatgcttattaattttcttattaccaatcactattatttcccaaatagcaaaatattgtggtagatgcttactacatacagtaagagactcagaagataagtaaatgttgtgattttgcatgatgtcatttaattccttttcaacaaaaataataaggctgcatttctttaccttaaataattaaactttcttttttttaagttaagctttcacaattgtaaatcacttgtggtacatgctcatgcttccttaggagtgatatgaaacaactgaatattcaataaattatcatccagatgaaaaactctttataatcttgtgcaatattctgtatacttagaatttacaataaatttttaatgtgatactaatccaagataaaaagctcaaaaacttaacctccagcaagttcaatatgtcacaagctatcagaggtctctagtttctgtctaattgccattggccactatggacttagagggaactgctaactaacttattagtcatggccgcagactccacacaccactgtcgcagaagactctcttgacagcttctgaaatgaatttgttttaattatgtccaattctacttaaattaaaagcagtaactggtggtcatctgatgtgggctcatcaagtccaggtgaacatgattttccaagaacatgtccccaccccttttgttattgcaacaaggtggccaaaatggctttcagggaggaaggtatcttgtgggaaagtattcacaatttaatccaaaattgggtaactcagttccacacccctgcaaaagaaaaccccaaagcagtttgggtttccataaggaactggcataataaaagcatatactcttagtagaacgactgatactctttcttagcaatgtgaaatatttcttttcttttttttgagacaggggtttcactcttgttgcccaggctggagtgcagtggtgtgatcttggctcactgcaacctccacttcccgggttcaagcgattctcctgtctcagcctcctgaatagctgggattacaggcacccaccactacgcctggctaattttttgtatctttagtagagatggggtttcatcatgttggccaggctggtcttgaactcctgacctcaggtgatccacccgccttggcctcccaaagtgcagggattacaggtgtgagccaccgcaccacgcctatgtgaaatatttctatgtctaacaaaaattatgaactctcctccatccacaaaagggttaatatgtccctatgtggccaaagtatttttttgatgacgacacacacttggaggaaggaattcataaataaagaggacatggttttttgggaaatctttgtgggctattgtaacgaaaacaaccacacacataccacttcttgtcgatttacatttctaaatatctgaagaatgctaataatttgcaccttatttatacctttccttccttccccccaccccacccccaacagctgtaagggccgaccgaatgcgtggaggaaggaataagtttgggccaatgtacaagagagacagggccctgaagcaacagaaaaaagccctcatccgagccaatggacttaagctagaagccatgtctcaggtgatccaagctatgccctctgacctgaccatttcctctgcaattcaaaacatccactctgcctccaaaggcctacctctgaaccatgctgccttgcctcctacagactatgacagaagtccctttgtaacatcccccattagcatgacaatgccccctcacggcagcctgcaaggttaccaaacatatggccactttcctagccgggccatcaagtctgagtacccagacccctataccagctcacccgagtccataatgggctattcatatatggatagttaccagacgagctctccagcaagcatcccacatctgatactggaacttttgaagtgtgagccagatgagcctcaagtccaggctaaaatcatggcctatttgcagcaagagcaggctaaccgaagcaagcacgaaaagctgagcacctttgggcttatgtgcaaaatggcagatcaaactctcttctccattgtcgagtgggccaggagtagtatcttcttcagagaacttaaggtatgccaccagctattacaacttacagcaccccttttaagagagacctaactatgttcctaattaatacattcttggtgctgaaaatatgtgttccttaattttctactttgtatgatttacagagtagacgtaattttattaccttgacttcaggactgtggcagcttaaatttatggggctttgattttgtgtagctcttagtttgggggggctggcatttaacataaagtataggaaactcgggcttttttttctaaatagtagaatatctgtattccttttaattcagatggtttgtggcttaaaacatttcaagtcaatgtgaaatagcgcctagtaaactatttttcttgaaaattaccatgtaaagagctatattataatggtgtcatcttgaaggtttcttttgaaggaaaaaatgccaacatttagtagtgtttagactctaaggaatgaaaatgataccactggttagtagtatcaagtaggtatttactactgtttgccttgacattaggttggtaaagcctttgttttcgtagcagattccaataggatgtttactgtcattggatggggaatgggcaaatggtgagtgctagtttacttggtttgggttgtagttctcataatctatgtcttgttgattttagtggactggtacattgtaaacatagtacttgtttgtatagggatctatgtttaaattaataattattttatttcctgaaacttaagtctgaatgaatgtgagaaagttatttagaagtttggaatctaagaggggctaccaaaacacatttggtagtcagtggtttcattcctattttaaaagtgagtcttgaatttgatttccaagtatattttgtcacaaaatcaatttcttccttttgctgtaacggggagagatgtggctgctaaatatctgtgacttgtgattacctaggacaggagattgattgtaaaatttctgagagaaggaaaatgcaaagccgacttttaattttaagagttactgttaaaaatcgtctgtgtaagtagatggtctggggaatgtggaagccacatgcaaatggaaaataatgctttcatagcagtctacattaagcactgttctttgtacatggaagcaaaaaagttacctgaacagacctaaataagttgataaaattccatcagcacgctgttaagactgtggacacatccagctctttatttccacgtcctttattgctacgcttaaaaatggctgaaggatatctcaggctgcaaagggcaagcagaatgcactgcgttagcacaattaggccagatattttccgagtatgtgttagggtttgtaaccactctatgataatcagaacatttttcatgaaaaaacaaaccatgcaaacactttcctgatattcttacattcaaaactgtgtccttaatcaaacaggtaaagtatttgaaaatgaaaattaaaatgataattttagatactgtcgaaaggttaggtaatgtaaaaatgaggaaaacacagactttttacaatcaaatgaactgcttaataattatgtcttcataggcaggttgttagattctctgagccttggtttttctcatgtgtaacttgtatatgtggtgtttgtggaggagtattgggagcacagatgtaactacttatattgaggaggttttcaaaggaaaatgagaatatgcagataaagcacccagtaccgggagtctggcatatactacatactcagtaaagtgtggtgctgttttaaattgatattactggggccgggtgcagtggctcatgcctgtaatcccagcactttgggaggccaaggcgggcggatcacctgaggtcaggagtacgagaccagcctgaccaatatggagaaaccccgtctctactaaaaatacaaaaaattagccgggcttggtggcacatgcctgtaatcccagcttctagggaggctgagacaggagaattgcttgaacctgggaggcggaggttgcggtgagccgagatcttgccattgcactcgagcctgggtgacaagagcgaaactccatctcaaaaataaataaataaataaattgatgttatcactgttgttttatgaaaaatgtgcagaatctacataatttttatatttaggatcaaaacaatgcaattatagtctcttagtttaacattggcaaaaactattacatgtgttatagagtagtatgattttgttataattaacagttattaatcagtactaattaaggacctaaaattggccaaggggtaagttgggtataaggtaaaaacaacgttgaataaaacaacatgtttcctctcagagtttataataagacagtttcataaataattattttaaaaaataaagacagccgcagagaataaaaatatattttacaaatcaacaaggaaagaaataatgcatattattttcatgtaaaaaaggaaacatgaagtaaatacagctagcggctgtaaggcattaagaaggctgggaaaactttttccactattcctctcttttccctcctctgtggataaattttacagtgacttctttatatagcatgaggttaaatatttggctaaaacataaatatctttgagaatggggcatataaaagcatttttcaatcaattacggtgttgtttaatgcatttatcagtctttcatagaatacgaaaaaaggaaaagggaaaaaagtacaaacgtgagggtcgtctacaaggggtgggagatgttcccagaagagaaagataattttgacccacttcacagtttgccttgggcttactttgaccaggagtgattcaagtattttttggtgaacaaagagtagaattcagaaaaacttaaggatagtttcagtagagagttgggaggtgactattgacatttggaagaattccttttcctttcgtttataaatttactttgtcagaaagcaaaccaactcatttgaagccaggattgagacatctctagggctgtggctttcaatttttttaatcatgacccacagtaggaaatgtattttatggcaggacatagtgtaccaaacacatcacacgggcgcacacacacagagatgcacaaacatacaaacacatacacacaactaaaccaaagtttcaccagatagtacataacctacaagccacgcactctgatattttctatctattctactttagtctaatttatttcatgtttttaaaaaaattctggtcacgactcactaaattgatttcacggcccattaatgaggcatgacctgcaattcaggaaaacttgctgctctagaggaggttttatcggccatccattggcgttgcctacctgctacaattaaggataataactccggaaaaaggtctcttcctcctggcgtggcctataagacatctttgaaacccacagcctgagtccccaccctatctttctgtaaaggttgtaattttaaaatatcatttgggaagataaatgctcttttttattcaatttgattttaattatttttgtagagacaggggtctcactctgctgcccaggctagtctcaaactcctaggctcaagcaatcctcctgccttggcctcctgaagtgctgggattacagacaggagccattgtgcctgttttattcattaaatatctgtccttttccttggtaacttcacagcaaattacctatcaagtgatatacttattggacagattttttatacctctaaaacccaaagatgaaaaatcacatatttgctcctaattaggcaattttgaaatgacctctttctcactctctttttttttttgagacggagtcttgctttgtcgcccaggttggagtgcagtggtgcgatcttggctcattgcaagctccgcctcttgggttcacgccattctcctgcctcagcctcctgagtagctgggactacaggtgcctgccaccacgccggctaattttttgtatttttagtagagacggtgtttcaccgtgttagccaggatggtcttgatctcctgaccttgcgatccgcccgccttggcctcccaaagttctgggattataggcatgagccaccgcacccggcctacctcttgctcactctctcaggacaaattacactctctaccacataggaaaaaaagagaatttcatttgtttactagttaagggaacagaagggccaggaaatttggtaggttgttttgtttttctatacatctacaaggtgcaaaaaaaggtattctggttttcattcaaaagattggaatgaaaaagaagaagttacaactccccaactctcatagaaaccgtggaatttcagagctggaagatgaaagggaaaagggctagaggacacatataagcgagctgctttgtttttttaacacacttgtaaaggacaattctggtcttcatccaaaataatggcttgagaaagatgaaattaatactctgaaacttgtagcttttgcaacaacagatgtgcatcaaaagatactcattgcctagaaatcacaaggtttttcagagctagaagagatcactgagatcatttgaccctacctctttttacatatgaagaaactgaggcagaagggaatgtaatctgcccaagattatccagctactgaatggcagaactgggactggtagattcaggttcaaagaagcagtcctcttgtacgcattccctcatcccccccagcatgcacacgcacacacacacacacacacacacacacacacacacacaaagaggcagtgtaatctttgactccaaagaaaacagtcctttgccagtgaagctaaagcaaatctctaggttatcagaagcccatcactaccatccaattaccaaatcactaataatcagtgagacagattttccctgagtccagatgaccccgtgggagtgaatgagtcactttaaaaagctacaataattctttcaggccactggggtatcattcagtacagtggattcagcacttctgggccttgagtttctgaagcattctctagtgccctaccctctgcggatagtttactctccaggtgaatctggttcagtgacggcatatgggctgtgctctgccgttaaagcggccaaacacgattatatcctgtgctctactagaagctgggcatgttcagtatgggtttcttgttacgtatgcttgtcgagatagcagaaaaagaatgcagggagctcactttggcagcatatacaataaaattggaaagatacagagattagcatgaccccctgcacaaagatgacacaggcattcatgaaactgtccataaaaaagagaacacaggatggtaaccgggtgataggtgagccactaataaaattttctgatctttaaaccaaatctgttgagtgacctatgctcttgactgtttccttgtgtttttagaaattaagagctaattcgagacttttgtattctgctgaaagagctgtccttgtgagtcaagaagattggctttttttttcagttattttttttttcacctgtgtcttgaatatctcacaaacacaagagcagtgagaaaataattcccactttgttaaacaactaatgaatctggaggatctatttgatcttctaatgagaccagatgtcttaagagaattctgggaatggatatataagaacttcccctcggtgaatgattctgatacatgtacgtattaaaaaaaatctaaattaatcctgactgaaactcccaactagcatttctgtggaaaataggtctcagagactcagggagtttgtgccaaaggaatttagccatgctgaagttggtttttaagtatagctttatctaaagcgagggcacaaggggaggagcaaaccttcttttttctctagccaattatggaagctatctgagcagcattatttatctatttttaacattctagatcctttttcctaaatcacagttacctttcccaatgcaggcctataatctcagactttattgaatctgccccaattttaagctatattctttagtaaatttacttagtcctacttttttttttttaagacagggtctctctctgttgcccaggctggagtgcagtggcatgatcatagctcactgcagccttgaccttgtggcctcaagccatcttcccactttagcttcccaaatagctgggaccacaggcgcatgcaaccacgctagctaattttttattttttgtggagatgggatcttgcgacgttgcccaggctggtctggaactcctgggttcaagcagtcctcctaccttggcctcccaaagtgctggaattaaggcataacccactgtgcctggcagccctacttttttttttttgtgacggagtttcactcttgttgcccaggctggagtgcaatggtgcaatctcagctcactgcaacctccacctcccaggttcaagtgattctcctgcctcagcctcccgagtagctgggattatagcgcctgccaccacgcctggtttatttttgtatgttttagtagagatggggtttctccatgttggtcaggctggtctcaaactcctgacctcaggtgatccactagcctcggcatcccaaagtttacaggcgtgaaccactgtgcccagccagccctacttttctatgggagagaaagagaaactgagagagaggatcctgctcggtgtctaccacatttacttgccatatggctgttctttgccttctcctgagagttggggtcaggaatcatgggtccaacacgagcactcctcattgccatgtgatgtcacagagcaatagccactttacttacctttgttttcacttctctggatgcaaagtagctaatctgggaagcacaaggatgacacaaagaaaataaacattaaagtttgttttccagtcaaatttttcaatgaatgaaaattttccaatcaaaatttgatctcaaggcacattaagccatctattgccagttctcatactcatcacaaagttgccagaatgaaataaatcgaacctgcataggtttacaaggaaatgataaaactggtttttcttccgctgaaggtagatatgaaagtgttctgtctttgtgaatttggagagaatgttggaatcagcaggtttgattcatggtctctaaggtctcttcaggtgttaagcatctgcttttatatctttttccaagcagacctgaaacagaaggctttggtgtggctgatagtgttggatgagaatttatgttatttcagcctttcttgcttacatacgtatattgcatgtgtctattgtagactcagaaagccattatctttcttcttgctttcttctgagctttcttcttgctcacaattcactgaaagaatcagctcttctcagtcaatgcctgtttgtgctatggccaactcactgtggggcagtggaacatgcccacttactgtggggatgtgtattgttctttactgggatatcttgaaagtacaccagtcacctcaaaactcccatgcattagttacttctactaaggtaaaatttactctccctaaaatttactgtttttaatgtacaaatgataaaacagctctttcacactttaaaattctcttgtgtccctttgtaataaactcctctccccaccccagtccctgccaatcctgatctgtttttgtccttagagttttttttgttacttttaaaaagaagtaaatttgctttattcgttgagtatacatttacaaactgcaaactcagtttaagctccctgaaacttatggtttcagcgtagttgagcactaatagtttccatggaaacatatcctccatggggcgctgggatatttggtaagagagtagtgatgatcataacttcacactgggtctgcttgttcacatgtcttatgagcgtcctgttcgtattaacctgtatgttatctactggaaccatggggagaacatgagaatagcgaggcacacccaagaaatccatgtttaactagcttggccatcgtcaggtgtctgaatctgaacagtgagagtaggaccacactgctaccgcatacctgactgcctcattctgtgtccctcctgttcgatatagtctggttttgcaaactgaggcttaagcctcggcagccaagagcaagcccttgttcctgttctgatgaggatgtactgaattattttgtattcagtttcctacgatgaccttctctaattacacaaaagaaaacataatgaatttacatatctttgggtcaatttatgaaaaaccattcttttcagtaatacaagtcctttaagacctgttggaaaatggtacagacgtgagcattttccttgctctgctctaggtcatatggtaaaggagaagagaagtaacttttcttgggtacccactaagcacctactctagtgctaggtgctttcaggccattttctagtttgatctttaggacagtccagtgatgagagcacagtgtatggtcatttggtcagagtgggagtaaaagaccatcgctctcgtataacatgttctctgtggaggatacgtccgtcagtcataatgactcatagagatgtcaagttaattgattcgtaaaagtttgctaaatcaattttttttctttttttttgagacagggtctcactctgtcgcccagtctggagtgcagtggcacgatcttggctcatggcaacctccacctcctgcattcaagtgattcgcctgcctcagcctcccgagtagctgggattacaggcgtgcaccacaacacccatctaatttttgtatttttagtagagatgggattttgccatgttggccaggctggtctcaaaactcctgacctcagggtgatctgcctgcctcggcctcccaaagtgctgggattatgggcatgagccactgcgcctggccgtaattgtgcttttttttccttttttctttttttgagatggagttacactcttgttgcctgggctggggtgcaatggcacagtctcggctcactgcaacctccacctcctgggttccagcaattctcctgcctcagcctcccgagtagctgggattacaggcatgcgccaccatgcctagctaattttcgtattattagtagaaacaaggtttcaccatgtcagccaggctggtctcaaactcctgacctcagatgatccacccgccttggcctcccaaagtgctgggattacagatgtgagccaccacgctcagccaaattgtactttcagtaaagtactttactgtttacaaagaacttccatatacatttttttggtcctggtctctgtctttcattttgggagcatggatgtaactggcctttcatcaatggttcagtagtgttgttttttaaagcctacaacagaaccatctcctatgaattgactatcacctgtctaaatgccctgtttacagcatgttgtacctgcaagagcaggatatttaaagtactttataattgataattgccattatcaatatgctcacctctttaccatattccaacaggtcttaaaggacttgtattattttttaccgaagagagtggtttttcgtaagtttacccgaagatacatacatttattatgttggttttttgtttttttttgtttttgagacagagtcgcactctgttgcccgggctggaatgcagtgtcgcaatctcagctcactgcagcctccgccttcccggttcaagcgattctcctccgtcaacctcccgagtagctgagatcaggcacacgccaccatgccctgctaatttttgtatttttagtagaggcggggtttcaccacgttggccaggctggtctcaaactcttgacctcaggtgatccacctgcctcggcctcccaaagtgctgggattacaagcatgaaccaccgcgctgggctgggttttgttttttgtttttgtttttttttttcatattagaggaggcccagacaggtgcggtggctcatgcctgtgatcccagcactttaggaggccgaggtgggaggatcacctgaggtcaggagttcgagaccagcctggccaacatggtgaaaccccttctctacaaaaattatgaaaattagcccggcgtggtggcacttgcctataatcccagctacttgggaggctgaggtaggagaatcacttgacctcaggaggcggaggttgcagtaagccaagatcgcactactgcactccagcctgggcggcagagtgagactttgtcttaaaaataataataataataattagaggagaccatcgtaggaaactgaagacaaaataattcagtatgtccccatcagaacaggaacagggtcttgttggttgcagagacttcagcctcattttgcaaaaccaggctatatataattggaggggcacagaatgaggcagtcaggtatgcattagcagtgaggtcctccccagcttgtgaatacctgggtaggcttaccttatctcccaacctcccagtgctcggcactggttcctactgaacaatcggtagaagcaattttgtcagcttgtctgcctagaagtagccacatgcttgtttgctgagaataattagggtccctgcttattccagtacttatgcttttccagcaggcacacagattgctcacagatcttatggaaaggctgccagtgttacttcctcagtgttggggaggtagagcccactaagcctgagccccctgttccctgtctgcacactgtcatacaaagtcacagaataagttaaacacatacacacatgcacacaaacacacacagaaaacatgactcatatgtgacatccctcaacacacttttgaaggactttgccctctgaacctatatggtaaaatagatcttttttattttccaggataaataaagaatgattttgctctgacctattcttctgcagcttgggaagtagatcatacaaatctttgagagttcaacatccatttgcagaatggctccatggaaattggccatttaaactattcttcacgttaaagacattaagctctaacccaagaaaaccacccacagccaagaacaacaaaaatgacataaaccacgtcacctaacccagcagttaggtatttcttgaatatctgatacttaaaacttaactcccctctacacctgtgtcctctccatacagtaggctaacatcaggcagccagtggcatgggcgccctggctggcttcatggggcacactaaccttgcacatcattttctttatcttctcctctctcctccttgtccacttttcttctgtcccaattcgctttttcttttcttacttcattaactctttttcctttccttctaatacctcaggaagcacgcttaggcattaccttgtcctcagctgcatcttcatttacccttcaggtgaaatgtggttgagcaaggaaggcaactcgttccctacaagtctgagaatgggtggagcaggcaagagaaacggttaaatagaccccagagaagggctgcagttaatgataataggatttctatctgtccttccactgtaccaagtgacttccacacagtggcattttccaagggtgagtgcagagggagtagctgctcagcttggatgggtatgggcaggagaggttactgaggctgcaggcttagcaaggtgagtatgcatggatcccacgaagtcaatgcaaaagcaatttgaaaatccctgcttttcaaataggtgtaagggtttctgtccatgacaaggctgttctacttcagtcttttaaccatgtatccacacagtcccagagatggtcactagtgtcttcctcacctttaacttcctccttggaaataattttcacatgctacgttcttgacctaccaggacaaattctatgaattcttcacgtatgtgtcctgggaaggaatagccaaaagctttgacaagaataactaagtctgggctgggtgtgatggctcatgcctgtaatcccaacactttgggaggccaaggcaggtggatcacgaggtcaggagttcgagaccatcctggccaagatggtgaaaccccatctctactaaaaaaaaaaaaaaaaaaaaaaatacaaaaattagcctggcatggcagcggccacctgtaatcccagctattcaggaggctgaggcaggataattggtcgaacccaggaggcgaaggttgcagtgagccaagatttgcgccactgtgctctagcctggccaacagagcaaaactccgtctcaaaaaaaaaaaaaaaaaaaaaattaagtctgaagtacccaggacttgttgaaatgctgcctgatcatttctctcagaaaactaacagaaaaccacattattttgaatatttggaaatgtcaatgtcactcagagtgcacaacattcgggattaactttttttttttttttttttggagacagagttttgctcttgttgcccaggctggagtgtaatggcgtgatcttggctcactgcaacctctgcctccagggttcaagcgattctcctgcttcagcctccaaagtagttggaattacaggcgtataccaccatgcctggctaattttgtatttttagtagagacaagacttctccatattggtcaggctggtcttgaactcccgacctcaggtgatccgcccacctccgcctcccaaagtgctgggattacaggcgtgagccactgcgcccgacccgggattaactttacaaccaaacttgatccaacttctaattctgtaagaataccatttctttacatgacagatggaataattggccaataggtctaaagtctgtcctttattgtgcaataagagcctcgcaaaggtggaatgcaacctgagatcttaaggtcctggtctctgtctttcatttttgggagcacagatgtaactggcctttcatcaatggtttagtagtgttcgttattaaattctataacagaaccacctcctatgaattgactgtcacatgtctaaatgccctgtttatagcatgttttacctgagagagcaggataattacttcatttaaattaaaaacatatttttatgggaatgacccatggtagacactggatacatgttgaattaacgtgctcaagacataaaggacggatacagatttctcaatggtaaaggcaatatgtagacatctttgctttacttttaagcaacattccatagatattgtcaataacctgaaaattcccagaataatgttttaaatgacttcttaattagcgttccttattttcatacaggcacactcatattcatttgctaaaaacaattatctgcatgcacaagttcagggtcccaaataattctccctggcagattttgtgtgtgtgtgtgtgtgtgtgtgtgtgtgtatctgtgtccatgtgtgtatcgcagtgttttgagtgcatatcctgttttcacacacattctctgaaatgttggctcattctaagggctgttgtttcatttcgatcactgtatcctgtggactctgaaactgctacaaatgcttcttcaccacacatcttatcagcacagttgtgtgcctttttgatctaaagttgtgatgaataagaggctttacttgttgcctaatttttaaaaaacttaccaaatattacatttccccttataaaataatgatatagattagtgtttgtgcagaagtgttggcaacagaattcttcaaaagttttccgttgagtgatgaaaagctgttatattattttgactagctaatcaaatgtaattggggagcttgaagtgccttagattttccttgtacagttatcaaagcaggaaatgtaactcgcagagctgatgaaagccatctctcatggtattctttcaattatagatcttacagagcaaatgaaagaaaagctctactgctaaaaactcagaggcttgaaatgccccttaatgttaactgctgtattagctagttaacacattattatgtactttaattgattcttactccagctttggagaaaaaaattatggatctgtttggcatgtaaattaaggtggggggaagacacctgagtgcaataacagcactattgctattaacacttagttcaagtaacatcagatacctgcagtgtaaacaatggccctggttcactttggcgtgtttttttttttttgagatggagtctcattctgtcacccaggctggagtgcagtgtcgcgatttcggctcactgcaacccctgcctcccaggttcaagcaattctcctgcctcagcctcctaagtagctgggattacaggcgcatgccaccacacccagctaatttttgtttttttttagtggagacagtgtttcaccatgttggtcaggctggtctcgagctcctgacctcatgatccacctccctcggcctcgcaaagtgctgggattacagatgtgagccaccgcacccggcctaatttttgtacttttagtagagacggggtttcaccatgttggtcaggctggtctcgaactcctgacctcgtgatccacccaccttggcctcccaaagtgctgtaattacaggtgtgagccaccccgcccggcctaaaagcattactatgttgcactcatctgttggtattcctgctgatgagtgttattgaaggagttttatttgaccattgagaattgcttttatgagtttatcaatgaagtgttataatctagtaaaaataacttcatttcagtcatatttggaagggtccagctgagatttttagcttttgaaaggatcaaaccacattacacctgcattttactggggtgtagtatttttctttgttgttgaatcacactcttaaagctgcccctaaaacatttcagccataaatgggtagtcctgacctaggatcaggccaaattcaaattttattcacatattcatttattcactcacacattcatcaaacatttatcaagtttgtactgtgtgtcaatccctatgctaaattgctggagacatgacagaagcaagtgctgtaatcccagcactttgggaggctgaggcaggaggatcacctgagttcaggagttcaagaccagcctggccaacatggcaaaaccccgtctctactaaaaatacaaaaagtagctgggtatggtggcttatgcctgtaatcccagcaactcaggagtctgaggcaggagaattgcttgaacctgggaggtggaggttacagtgagccaagattgcaccatcgcgctccagcctgggcgacagagcgagactccatctcaaaaaaaaaaaaaaaggacgagagccgtcttcactttacaagttaagtcttcatggcagttttctcaattaaagtagaacccctcctgacattgatgcggcactaaacacaatggcaaactctgaccctgaaatcttgtgcaagtacttggttatgacagcacactaataaccccagccctgtttacaccaatgtttaagattatgtttgaactggaaaggacaacttaattcccatagacaacaaggtgagagtaagggagggttcagggcggcatcactaggagagaacagctcgtgtaaaaatacagaggctttggcatagcacttcttggaaacttcaagtaattcctatggctggaaggacaaggatagggaaggggcaaggggtaaagctggacaggtgagcagctcatttatacatacggttctaatatggattttattcaaagcaaaggggagccactggaaaaacttaagcatcgggggccagaaggattgaaaatgtaccagggacatatgcccaccacataatgtcatgatttcggtcctggtataggattttccttaattgccagcatttagcttaaagtgcatttaaatattgttttgtttttaatttactatctaaacttgtactaaaggagttggtatcttttatgtccttagttatttttgttattgtctccaacagacctttttcctctaggtaaattttggttattgatgacatgtatgtatttgaggtcctggtccttgtttcatatttaatttaaagaaatgtaatgttttaaaaattatttatttatttatttattgtagatatggggcctagctatgttgcccaggctggtctcaaactcctaggctcaagcaattcttctgcctcagcctcccgaagtgttggggttacaggcttgatccaccatgcccagccttcagatttcttcagtataacattctttttgaccagaaagttttctttttcttttttagttttaatttttttattgttttgagacagagtctcactctgtcacacaggctggagtgcagtggtgtgatcttggctcactgcaacctctgcctgggttcaagtgattctctagcctcagcttcctgagaagctggcactacaggtgtgcaccaccacatgcagttaacttttgtatttttaggagagacagggtttcaccatgttagccaggctggtctctaactcctgacctcaggtgatccaccacctcggcctcccaaaatgttgggattacaggcgtgagccaccatgcccagccaagtttttctttttaaccttgaactgatttattgctgattatttcatagttattattttaatgacaccaaatcatccttccagtatatgcacacatcgagggggcagtctagcccagtgtgcctaaagtgattccacactagctttttaaaattacatattcccaaattctaccccagacctgatgaattgctcatccattcatatatttattaattcaacatacattaattaagtatccagtatgtgtcaagccctgttctagaagtgggaagaaacaagtgaggaggaagggagcagttagaggggttcagagaagaccaatgtgaagagctgacatttcagctgaaatccaaataacaagaaagaaaacagccttgataaatctggacacacagcactacaggcacaggaatagcatatgcaaaaatcctgaggtagaagctagcttaatattttcaagaaaataaaggaaggtcactacctaaaaatcaatgattgtgggggaaatagggctcttgaaaatgtcaaaaagtttgacaaggtccagctcctggagggcttggattttattgtttggaataggaagccataggaggattttaagcaatggagtgatttcatcgaattctcagtagaaaaactattgcactggctgcagatgggaaaaaagttgaagggaagcaagagagtatacaggaggtccatcaccccaggggagagatggagagatggtggcttagatcagggcaggagaatggagatgggggagaagttgatggacccaggatacatgttgaggtaaagctgatagaatttgccaaaaagactttgagagaagatgaggcaggcaggactcaggtttttggcttaagcctttgggagccatttgtggagaaggggaaccagaccatctaggggaaaatcctgcacatgttctaaaacttccctaaacagatagagccaggtgccagagccagttctcagatgtcacctttgggaactattcatttattctaatccttatttttattcaagaaggcacagctcgaccactccacgcagatataaattcaagctcttcccaaagatttctcaggggtggggatcctctatacattccctgccatctatttaattaattatctttttttttttttttttgagagggagtctcactctgtcacccaggctggggtgcaatggcacgatctcggctcacagcaacctctgcctcctggggtcaagtgatcctcctgccccagtctcctgagtagcaggaattacaggtgcccaccaccatgcccagctaatttttgtatttttagtagagacagggtttcaccatgttggtcagggtgatctcgaacttctgacctccagtgatctgcccacctcggcctcgggattacaggcgtgagcccccatgcctggcccctgccatctattttaaagtttggcagtagtcaagacattcttttatgtacaacttaaatccttccttctgcatcacgtgtcattccctgtggacctgtcaatagagatggaacacgtggctaccccttgcttcatcataaccctttacatgatgacttgctgaattgcagctatgtgaaaacctaaaaaatttagacattagggaatctaaatttatttcagtaattaagacagaggggtataactaagactgatcacctatctatgcagccataaaaaagaacgagatcatgtcttttgcaggaacatgggtggggctggaggccattatccttagcaaaggaacacaggaacagaaaaccaaatacctcatattctcacttataagtgggagctcgctgagcgcggtggctcacgcctgtaatcccagcactttgggaggccaaggcggggagatcacttgaggttgggagttcaagaccagcctaaccaacatggagaaaccccgtctctactaaaaatacaaaattagcctggcagggtggcgggtgcctgtaatcccagctactcacgaggctgaggcaggacagttgcttgaacctgggaggtggaggttgctgtgagctgtgatcgtgccattgcactccagcctgggcaacaagagtgaaactctgtctcaaagaagaagtgggagctaaatgatgagaactcacgaacacaagggaacaacagacacgagtctgcttggggctggagggtgggaggagggagacagcagaaaagataactacagggtgctggacttaatacctgggtgataaaataatctgtacaacagacccccatgacaagagttcacctaggtaacaaaccttcacatgtacccccgaacctaaaataaatgtttaaaaacacacaaaaaagactaagtgcctatgcagacaccagtgtgcaaattcagttggctacgtatgcagagaaataatggctgagaacatttagtgcttcctcccttgaagttcctgattctgaggttggctctgagctcaggaaactttgcactccttgtatttaaagtgtgaaatattacctttaaaggtatttttctccttcagtatgaaacctatagatgaatttcatccgatgtttgcatcagtgtcttggcatagacccaatttgttttcctttgttgtcctttttatgagggtaaagttgctagttattttaaatattttttgtaagctttatcttcaattctttaatgatctttgttgctttttaaagaactctttcaactttcttttctatagtagcacaagaatccaagctatagtctttccaaggcttctctcctcctggggcagagcagtgtcagggtttggattagaaatcaaatccagggatttatctacaaaattacagatgagcataaatatgtcatacatatcagaatcaataaccctgctaatagcaatgagtgtttcatctattataattcttcagtctcccaatattccaacaggacttagtttcccactacttcgaaacttacttaatttacttctagtcatttggaaaaaaaaattgataatattttgtctgatatctttgaagttgaaaaggcttcttgccagtttacttattagcccaagtcagtggtcccttgcagcagagattaatcccagctttgcggactctaaattttatacaatttaggaagcgctcagtgaaaaagaccacaaaaatctctttcttttgcacattttacaaaaacattagacctggagcatacacattgcttgagtccctcaaaaagccatgggattttctgtgcaagtaaaggctgctgaagctgaagctcattagtttcaggtaaatctgcttccgatttgcagttctgctaaggtatttcttgtgtagaatatcatttgggctaggaggaggtagaaataaagatagaaatctacacagatgatgatattttaaaatttggtaaaataggatttaagtctatactacccaaactgactgaaaataaatattaaccccagacatctgtagtgagtttttctttctaaaaataatttctcattgacccagggactatcaagaaagtcatgcctggagactaaagaagtaatttttctctgagctaagttcagcatttatagcctcattagacactctgtggttattcagtcttaagcattccaccttctcctaagctcacctagactagctgataccaggcatagtcccattagttcaatttcactctccttaccctaagaaatttttaatatgtatatcaaacaaatttaaatggaaaatgctgtaagttctcttttagttctgatgaagaatttataaacaattcatattctttttttttttcttttgagatggagttttgctcttgtcacccaggctggagtgcaatggcatgatctcagctcactgcaacctccacctcctgagttcaagcaattctcctgcctcagcctcctgagtaacacggattataggcatgcaccaccatgcttggctaatttttgtatttttagtagagacggagtttcaccatattggtcaggccagtctcaaacctcaaatgatccacccacctcagccttccaaagtgctgggattacaggcgtgagccaccacacttggccaaacaattcatattctacaatagcaatatagtattgcatatagatacaagttttactattatctaattaggaaactgtggggtttcctatggtaagattataaagtatgtcataaaggttttggaggtcctcatactgcagaaatttaatttttctattcgtaaaaggaatcacattaaaaactactaaattatcttacatttcctatttgattttatttacccagtcttgcccttcatgccaaagtaaaaagattagaattcttaagtgactaattaagaggaacattggaaaacataatctctaattatgtctcaatattacacgtgtccatgaatagttatctctaagatgaactccatttggctttaaaataggatgttagagatatttttatgaaaagtttgctctccagagctgtaagttcaacataaatttggaaggctaagggaaagttttttttttttaagtcgtctttattcacttctaattttgcccgaaaaataaagtgacatccttaagtacttttcatttgtgaggtagtttgactgatataaattgtgcagggtagtagttttgtatacagttggttttaggtaatttttcccaggcatctactttcctgttcataataagctgtcagtatatgttagttaaatgaatggatggcagagcccctttgtgcatttgctgtgggcttcggctttctcggtcttttggtttgaggaatagttaaggcacacagagaaggtagcctagcaaatcttataagccagtcatatttgggagtgtctgaggatttttatttttaaatcatctacaagtcaagaatatatactttaaatgaaatgatcagccaggtgctgtggatcacacctgtaatcccagcactttgggatgccgaattaggaggatcacttgagcctaagacaaggagtctcagcatagtgaccctgtctctacaaaaaatttaaaaattagccaggtatagttgcatgcatctgaggttttagttacttgggaggctgaggcaggatgatcgcttgagctgaggaggtccaggctacggtaagctgagattgcaccactgcactccagcctaggtgacagagtgagactctgtctcaaaaaaaaaaaaaaatcactcactgttcctgcataataacttttaatcaaaaatctgttccaaccccccagccccatcccccccaccaaatatatacacaaacctgatttagagctggtttaagtggctggcttttgctctgtgtcaatgtgccacgcctgtgtatgtacctgagcagttaggatgcatagcagagtttcagtttatatgtgcaggctctcaggtaaaagggagaattctggaagaatctgcagggaatactagaaacgtgttggcaatactttataagagagagtaaaaatgaatttatcttttgaaatgggagcaaagctacctatttttccagatatatacgtccttttacaagtcgtcctttttagagcaattgacttctttggtttgaaattatttacccagatggctgcctaacgagaatttgagattaggtcaaatcatttgtaggactattttgattaatgttctttgatttctaaatcaaatgtaccagaccaaacactttcaaagagaggaattaatatccacaaaatattatttcatatgcttttgctctaggtttttccacagctttcagccctgtctcatttcaccttaggaggtagagaaaaataactaacacatcaataattagtttagacctgaaaacactctgctgcacagctgtaatgtttcacaatggtttctgagctaagaggtgtttatgtagcatcaactttatcgaaacaaaaccctaggtaaaaacacattgaaatggcacttaaaacaacaacagtgcccaaaatctgttgtttcattacacttgagtataaggcaaatctggaagttaaattgtcccatattgagaataactgaataaatgtttacataattgctcccacttttgctgaatcttttggtttgatcaggtttagagcagagaggtaaaaaatacatttattaaaagagagcttttgagattgaatgctctaattaactgctaattacttctctaactaggctattttagattaaaaacctaactgtctcaattctagtggattttgaggttgtgatgaagagcagagccgatattcagtgggaccacaggatcaagcactgcctgtgttactcagtatttctctgctcagagacagaaccaattataatatttagcagattttttttattggaaagtcttaaaaattgatcagttttaaaatagatgcacacaaactaccttgagctttactttctgatgaaaacaatctatactatatgataaagaacagatagatatggaatgctggttcaagctgacaaaatatgcacttttgttgtcttagatctagtgaggaaattgattcatgtttggtatgactatcttcacaaggaattgcttataaagaggtagggcctaactcatttatataaatcgaggtaaaggaataccaggagtaaatctaggaaaattaatttttctgtttttaggtgcttctaatactgggaaaccctattggtttcaaagggaacttctaggtgagaccatttttagagaacttgtattccagcaagcaattttttatggagcagaggaagcatttttaattattatatattctaaccatattatatagcaatcagataaatttaaagttatagtctgttgattaataaattcatggtgggttggctataatagcaattttgcttcagtatctaagacaaaatttgaatgatttgagaatgcatgatttacctcataatgtgacacccttttaatcaaaacacccgaaggccaaataattagatcttgtataaaacttggaaagaaaacaccgttgtatacccctacccaccattgaaatctgtttttagttaataaggaagtgggagtaaaatatttgagtgagcctatatataggctctcatgtattaaaagaaaagctatttacaactgatttgttgctaaataaaatcttggatgaacacttttaattactaaaaaggtaaggttacaataaacacaggaaatataaatgaataaagtgtgcacagagtcatgctgctttcaggactataaatagcacctccatctctgctactattattagcaagtatgaacaaaagaagatgtccagaaatagaaaggggaagagcatctccatgagccttgtattccatggcataggaaatgtttctagcaagcccgtgaatttagagggttaattgatttttagaaaggacatttccatgctgtcaatttgccaaggaaattcttttaccagcatgtttgtaaaattggcaggctgatgtttcctctaggtgacacaagatgtgatgaagaattttatctttacttccttacgaaaatcagcgttgattgcttgcctttttgttaacttatttggttactattagtttgcatctacagaggatcagttaacatagttgaaactggaagaactagtgcatcgtgaacagccctgaaccaaaagtcaggtttcagtttcacctgagccactaatgtgctctatgactttggtcaaagcatttacatacatatatatatatatatatatatatattcccctttatatatatatatatatatatattcccctttatatatatatatatattcccctttatatatatatatatattcccctttatatatatatgcgcacacatactgctgtcccttgatatctgtgggggattggtttcaggaccttccacagatattaacatctgagaatgttcaagtctctggtataaaaatggcacagtatttacatataacctcccatgtactttaaatcatcttaaaattataatacctaagagagtataagtagttgttacactgtattgtttagggaataatgacaaaaaagtctgtacatgtttagtacagacacaatttgttttccccaaatacttttgatccatggttgaatccacggatgtagaagatacagaatcacagatacgtaggccccactgaaacacacacacacacaccacacacacacacatatgcacacacatcttctctgagccacagtttcttgattaattaatatagcaaacatatatggagcgcctcaatatgccaggcacattgctaagcagcagggatacgaagtcggttaagatacccagtccttgcttactagcctcgcactgctgggagacagacttttgaacctgtaattagaatgggcaatgggtgtataacagagacgatagctgttataagaacacagggcagagcttttctgtctgtggagggggcaccagggaaaactttgcagagatggtgccatttgaatcaactcaatcttaaagaattcctcttgaatttttcttcaagactgatttggatgaaaatggctatacttggtcctcgtgaggaatcaatgacataataaaagtatgctaaaaagcataaaaaacaatataaatagtctattagtaatgaaatgattcatgggcatgaatattacagatctagttctaatttttgattgcctgtttattaatgtttttttctttttgataatgaattatgagtgcagttatttgagaactgattgtaagactgtagttaaaagtgggagaggccaggcacagtggctcacacctgaaatcctagcactttgggaggctgaggtgggaggattcaagaccaacatagcaagaccctgtctttaatctaaaagaaaagaaaaaaaaaagaaaaaaaaacaagaaagagagaaagaaagaagaaaaagggccgggtgcggtgggtcacgtctgtaatcccagcactttgggaggccgaggcgggcagatcacaaggtcaggagatcgagaccatccttgctaacacagtgaaactccgtctctactaaaaatacaaaaaattagccaggtttggtggcgggtgcctgtagtcccagctactcgggaagctgaggcaggagaatggcgggaacccaggaggtggagcctgcagtgagccgagatcacaccactgcactccagtctgggcgacagggcgagagtccatctcaaaaaaaaaaaaaaaaaaaacacgagagaaacacaaatctcaaacactttaattttttttttttaaatcactatggactggaattaaaaaaaaaacttctccaaatatggatatattttcccataagtagtcatgatagactgaatgattattttttaaatagttacatttttaggggtttacacgtgaaattatgaagatatggaatttagtaataattctttttaaaaacatgtattacttatttataaactatatgtgtattctggtgaaagattgtcctctaggaaaaataagtcttagaattatttctctccagtaggaatttattattgtcctatcttcagccagacagctctgtggtaatttcatttggtgatctctttaataaatattttttggagtgcctattttgtgtgatgccaaatgaagtaaacagtgttttatgtaatatgttccaatatatattttttagaatgaaccatttaccaagtatacataagtcagacattgactgcatatcccactgaacatttccattaatataagtggaaaaaggaaagccgctttgcaaaaaaaggaggcttttttgcttcagcaatatgcaaattaatttgaagcatgccagtagttttaatataggttgattcagaattaccattgtgaataacattcacttctattactgcttttgttaaaactaagcgccaaaaaaggaagcctctttgcttcagcaatatgcaaattaatttggagcatgcaaatagttgcagcatgcaagtagtttagaattagactttcattaaaactaagtgccacacagagaagaggtgtaaaacagagtagtaatctgttgcgtgcacttgaagggttcttgaaagacgtgcataaaccgttaccgttgtagcacaagttgagcagcaaaagccaaagtcgcacatctgtgtcttgtcgccacctctccacttatccactcatgctggcttttctcccagcagctctttgccctcctccttttaacactgtgggctgaggtgaggatgttctagtcaagagtctttacgagccttatatcgccaggctttcagaaaatgtgaagcatggtagtgtgaatttagaaaaaataaaagtgtgtataaaagctcttctgttttcttttcttttttttttgttaagaaacaatagtgtttatttatcatgttttgcttagaattcctttggtattctgttctcttgattttaacaagaagctaaactcaataacatcttttaaaaacaaaacaattttcggttgagggtgggtgaggaagttatatgaagattgagtgggaacctcaacccaaggacataatagacaagaaacagtttttttcctcccctttcttcagaagtagtcttccgcatggtttaatgtgctaacataaccccggttccaatatttcaaaagatacagaacttcccagcatgatgataaagttttcctgtgttccaataataaaacctcaacgtaccagtgatttccagttcctttgtggctcagcaacttgtgaagaccaactaagtcctaagtacccagcctgcagtatcagtgtgggagtcggaaacagatgttcacgggacaatgccatttgttgtcactgtcgatactatgtggcaactttcccaaatgaaattgtttgtggatggaaaagaatgtaagcagtgattcatgcccaggaatttttttttttttttgtctgcaggctaaccgtatcttatttgttttaaatcgcagagcattagtggattaaaaattttaggttaacttactattatagtatctttttcattttttgtcctgtacttctaaaaggagtgactaatttaggtagcttactgagaatagtaaataccttacttgatttgagaattcaaaagcagctgacatcttttcagatttagtgttttaactattgagtaggtacagagttgccatttaaatgaacagcatgacttgcttagcatttttgttaataatttggaggtttggagaattcaaaataaacattaagtagaaacatattttttggtaataggtggcattgcatgatcttggtttgagattttcataaatattacaaaggaacttccactaactcactcactgttagagataatagattaatttgtataaattaaatattaattatagagaagtttaaaatgtacttaaaatgaatttgatacaacaaagctacttaaaagttaggtagaccatgtcatgtgacatgtatacaaactatcctttttcaagaaaaaacctaacaagcgtttaaggcataatatctactactttagtgccgtttttataaaacataaattttaatctacaaatgaaagtcttttaaacatttattcataccaacagatgcctaaggccagaattataaaatgttttatgttgttttaaaaacatatgtatttctcataattaggtttcggcatcacagaaaaattattttaagggtcatacaacaaaatctgacttttaaacaacagccaaaggaaagattggtatcacatgtagaggaagaggtccttaattaagaagcaaattccggagtttcagtaactcattttcactagctaatgtttaataaattgtattaggttagtgcaaaattaattgcggtttttgccattaaaaccacaattaggttgggctgggtggctcaagcctgtaatcccagcacattgggaggccaaggcaggtggatcacctaaggtcaggagttcaagaccagcctggccaacatagtgaaacctcgtctctgctaaaaatacaaaaattagccaggcatggtggtgggtgcctgtaatcccagctactcgggaggctgaggcaggagaatcgcttgaacctgggaggcggaggttgcagtgagccaagatagtgctactgcactccagcctgggtgacagagcaagacttggtctcaaacagaaacaaaaacaaacaaactggcaattaattttgcatcaacttagtagttgtgtggttccgtcttcctcggacttctttttctcatttgcaagatggtacgtcagtctggatgacctttagggctctcgcagtttttgattctagtttagggctttgacttctgttctctagcagtcactgttaacattatttgagtatctgatgatagcttgtactaattttcccagaaaaatgcataaaacagaaattttgcatgcaatcccagggcttcatggactcattgaagcctagtgatagtcccaggtaaagaagctagttaaagaaagttagtatcctcacgtttctgtgaagattcaagcaagcatttcaaattgctccaaacgtgggcatcagaactttctgattattaaacaaagttgattgtttttattttctaacatatctacgttagaaatttggcattgataccagcacacttggagaaggcaaaaacacatgagttggtccactaaagacttcaatagcacttggaaagagatactcgtgtgtgttatgtatggcatgtcaagggaagttacctacatcccagctaccttgctttagaacaggaaaggaatgaactaaggtgcacttgcctgtctcaaccagtgaatcaagactgattgtttgtagttattttaatttatgaaaaattcaaaatttaatgctacagaaaagacaatgggcctagggaggactatgttaaagtcttgttcattttctagacccaacagagaatacttgaatgcacagaacaactgaggaaaatcatactttaagtaacaaatacaaactagaaattaattctttcataattaagactatttcaactattaattttcttccaatatacccctctactttttttagccatttatgggtcattctacattttcttaagttctaatatgatctggagaatgtcttggacttctttaaagtaacttcatgcatgtgctctcattagatcctttatttactaccttactttaatgttatacataatacataataaacatgtgaaattcattttaatgaatagtgtaagcctcaaaaaatttacttaaccacttctttgacctagcaaatttataagcgatagtaaaactttccttttacctttacaataatagcttttaagtactcaggctgacaaattcttcatggactcacttttatgtttttcaatttctattaatttctctgtattaaagttgaattagatggatttatgttgcctattcctggcattcatagcaactataaggcatgatcaagaaaacagaaattctaatcctcatgttacagaaatggccccaattctacttgacagaaatgatttcaattagggagtctctgggctaccttttctgtttcaccagaacaaatgttattgatataaggggaaatccttggataccatataacctgctcactctatggagcagagttacttagagtgctccgaatcccatctttgatctctggcgatatttttctctgttatgtcactgaggtcacctggctcatgtgtgacaaactgcctgcataagtcacagtgccagtggcagagatttgtaaccatgcccctggtccattgcctttgaattatttcacaggcccgctgctttacatttacactctgtcggaagatgaacaggggaagggagtaaaatcaagggcagggtctcatcctgaaggacaaggggaaacaggtggaaggttaatggccctggagcgattccacaagcctctcaggcttgatatatgggcctggggcctaaaacgggcattggctttcaaagatatattatttcatttgaggagagacattctggagttcctgcatttgtctgctgatagatgatcctctgtccacaattggttatggcgtgtgagttttccttgggcctgctcccatacataaaaattttgctgagctctccaaccttttgcatgcctttaggaatgggaccggtgcaagcccactggcaggctgttggatttttttgctgctattttagtagttccttttgaaccgtgaggcaagtggggaatgaaagacacttctgttcattcatacatgacttgataagggtggccttgttataaaaaaaaaaaatggtgaaagggatgttaggaatcaaacatatgtgtcattttgggaagacaggctcagtccaaaatttagtcatttgggtttcaaaaagttgcttacataaaagctagatactatcaaatagcttttgactttattactgttttgcactccccaggcttttagcaaatggcttactctatttttctttattatttccaaaaagtttgaggtgatttggagaaagaaggagaacagacagttggaaaaaggtgctttacacagagatccatgattaatttgcctaacaagaaccatcaggcaatgctaccaagaaatatgtctaatggctcaaatgttacaatcaaatagaactggtcactagattaatggaaccagtcacccgaattaaccttgtgtggcctctcaaagttgtactatagagtctaagactgcaaaaatcatttgcctcagcctcttaatgttcatagacttaatattcatgaaaatatttggattctaatatgctttgatttatagtattttgaaatttaattattaactctggtttgagatatatatatataaaatctttgattttatagttcctggtaattgtgatactagctttgtcagagagagaatgcttattttatggcaagcattaaggaaaaatgagctctgtaaactcactatctaaacaaaaggcgatttttctttccagctcttttgtgttccattacccttgtgtttggtgaattctcacaccactgtatgaaatatcaaaatcctatttgtggacattttatctcgaatagctttgtcaaaaacaaattcttcacctggagaaactttccattatcatcacagatacactggcatttaactacaagaagttaatattggacaaatgatcagataatatctgagtatcaataggaatttcattcttggatgagaggcaacaaattgcaaatacttttcacatatatttacaagggatccttatcacaatccctattcatattgccctcagtagaaacatgcagcatctggccattggcccctgttaataatgattacacagatgtccttttcttttcctctggaatattgcaaagtagaggttagaccagaagcaagaagactggagaggcatgtttagtacctgcaagaagatatttaataactttcttagaggaaagattcagaatcaccagttacattgagttgaatgaggagcattagccgtcaaaagaatctgtttttccacttgttgcttggataaatggataaaagcctgccaaggacttcagtccaccagctgagggtaccatagctaaaatactcccaacagaagggcaggtcccaaaccacacaggcatgcttttcaatcacagaataaaatgtagttgttttcgtcatttcagcttgtgacctaaatgcctcattttcatgtttgaaaagttaccaactttatttcagtcctatttcccttcctctgtggtatttcccagtcagtagaccacagtcctgtgggttatatcaatgcctaaagcagagatcaaatcaaagcataccacataactggttaaaatgaaagctcattccgaattagtaaataatgcccgcctgtcttccacatctgtcaaagtctcccagctcagatggacacctccataagctgatccataggaagccaaatacttgcaaacagcctcttaattgctcatttgcagttggacaaaatgctaaatgcagaaagacttcaaaggcaatggaatctgcattgaaaacaggatctcaatacacatagtcgcttattgttgcaaaattagaataacaaatgttcccagcatgaagccaacataaacttgcctgagtattattcaacctgaaacatagtctaccttttttttttttttaacagcaatagaagaggcatacttagcactctgtttgttattctatactgttcattttaatgatatatttaggtctccctgacactttgtatttttacgtgtaattacccatattaaaaaaaaaacaccactcattagtgttctgttctactgacttaattatgccccttaattaaatctcagctaacagggggtcaccgcagtgtcagtgggatttgtcactgtttgtcagcaggtgtctggttgcatctatttctggttttcgtatggtttgaatctatttaagaacttgctacaaccccgtcctcccctccacaccaaccccaaatgccagagacagcattctcattggagggaagaagcagtatctatttgacaggcaactgcttcccaaaagcttgtttgtaagaggaaatttttgttttcattactctagaaaaaatctcctgattaggggaaagatgcttaaaacagacttggataaaacagatgcactatttaaaagatgaataggtttacattctaaaaattatgatcatatttttgtatacaattctaaaagttccttgaagaacaaaaaatatattttgttgctgctgttatgagaagaacatcacattaggtgttttgcatcatctggccattggtgtctttgtacagagtactttgtatcaattatttggttcacgtttttcattttaagaatataaaacaaattacaaacatatgagtcaaaccgaaaaaaatgtcttttgtgtgactaatgtagggtcaataggaatttaattcttgaatgagaggcaacaaattacaaatacttattatttggaatgagtcttagtattaagacttatatgtcttcacatttcacattagaatgttttaaactcatgattttagtatattaattaagggagatataattcccatgtttctgtatataataggcatctaatgttgatctgaataattgattagtccagtcaggcttttataattagttgtcagcttttcagtgtaaagccctcaaaacacctgctgtgcatctacaaaggtcttacatatttattagtgtttttaacctaaaaaggcatgcaacctacctgaaaagcatttaattttttttctggaactaagatgacccttccaacatataccctaagaaactaaggctatatgtctctgagtttttcagtctagaagattttggactgaaattctgatttttaaaaatcataacacttatctttatttaaagataaaaatgtcacagtttttctatggaagtttttcagaactcatatttctaatagtaaggttaagcaagacaatgggttacagatatcaaactatcaacaatgtaaagtagttttgagacttcactgtcattattgtataagcaattttatttttctgggtttacctacaaatgtggtagtcacagaagaagaaaaataatttaaagaaaaatttataatactcagcttatttatttctgaaattcaaatcaattcatttcatcctaaaaagttaactccaactggcttttcttaagtaacaaatgtcatcatttgctgtccaagtaattttcaatacaatgctcatttgatgttgcctctaaagttcttatcacacaagtaataagtaatccatacattacatatatgtgtacattttaaaaaccatttcaaatggtgagataagaatttttatgcattttatggattcctgtacagcctcctcattgtcattagataatgaaaggcttcgccatgtgtgtatcgtaaagacctactaagcaatatgaactctccagattgctttacatttacacagttgaagtatatatatatacagtattgtacagtattgtacagcaatattgtatagcaatgtacagtattgctgggcacagtggctcatgcctgtaactccaacactttgggaggctgaggcaggtggatcacctgaggccgggagttcaagaccagcatgacaaacatggagaaaccccgtctctactaaaatacaacattagccgggcatggtggctcatgcctgtaatcccagctacttgggaggctgaggcaggagaatcgcttgaacctgggaggtggaggttgcagtgagctgagattacaccattgcattccagcctgggcaacaagagcgaaactccatctcaaaataataataataataataataataataataataataataaagtacagtttaaataccatagggtaggtcagatattcttaagattccttctttcattcagtaaatacttatcaagtattagtcgtatgccaggtaacattataggacttagagattcaacatgaagagcatagacaaaaatccctgcttttgaggatcatatttatatctattttagtgactaagagcatttatttaagacaattgcactcatgtaattaaaaagcacttataatctggcaagctagcctaatcttagcaatggaatgtttctgctctctttctgtttaagccttcaggagatcataccagttttcccaactggcatatggtgagttcaagtacatttcccacatatgctcagggattatcttaattgtattcctttctgaagcttggaatcaagggaaaaaaagaacaataatgatttagggaaaaataatagttttttaaaggtagatttatagttagtaactttatataggtgaactgatcacagagaagggtgtaaatcatctgaataaacaatggattttcacacttactagaatctctaagaataatattttccatattacagctaaatgagacccattatgtatgctttcagataaactcacaaagctcttacccatgtaaatctcatagatctgccattattcgtaatgaataacaagttttatcatgcattttcattaaaaatgcattaatccctttgtagtaacctctccctaattcattgattcgataatacaagaacagtaaacatttctggcataacaaaaatgtggtatcaaagcatactgtatccataaatacaaaatgtaacaggaaaacaaatacatttatcaaaggaggatcaggttttccagccactaaataatgctatggtcgaatactgctacagtctaatacattaagaactcaatcatagtgccgcattgtgagccgtttgtaccggatctgattcttccagattaaatgacttgttgaaacttgaagatgaaagacaggcagaagtatccggggctctaccctcaggaggctccagggtgggttactgccagtgggggactaatgcttccgtctagtggagataggaggaggaggatcagaagtgacatgtatgtacccttttttacttgtagattatttacttagctcgttttaggctctgtgtcctcatctgtaaaacatggcattacctctttcaggtattttactggggattaaatgacttaacacaaattaagtccttggtagatagtatatattcaagaaaagtcaatttcctccttcctttattgatgcttaaaagcccctggtgctgtatttgattgattcaacaaatacttgggcttggcacaaggcactggctatacagttacttccctcttatcatcaccatagaagcctcctgatgtggaaattaggcaggccttggagtcacacttggcttcaaatccccttccatttgcttcccataagctcagcatgtaacttcactgtccttctctaaaaataggggtaatgtataacttacgtggttatctaaaaaattaaatatttgtagagtgcagtgtgctagaatatctggatacagagagatggattagagatggtgtctagagcacaacagaatgaagacctatctcaaaaaaaaaaaaaaagaaaagaaagaaagaaatggtctctacccttaaagagggggatacacatgtacaaaactgtgaatcccaatgcgatttttgtggggaatgtgttcgaatgctgttcctgaacatatatctcagcatttccaaaacaaaaattacatttcagaaactcagtagataagaaacatctgcaaaagaccgacacaatttatcttcaaactaacaaatgtgttgatctatgtgcatttgatatctctatacttatataggatgctaggagacaattgttttaagtctgtgtggtgctcattttctttgcgcctaatgtaagagctgtttggtccatagtcacctctgtccattctagaatagagggtggtgagatggggggtggtgtttttactcgtgagtcgtttggagattatcaggctaactacgtgataaaagatgctgaaacactggtttgagttagggtggagaaaatgtgaccaactcccagagtccagtatgattcacttactgttgttaagactttctgccttcctttaattactatgtcaaacaagccttatttatgccaaacaattaagtctattattaatggagaggtaagagggtggggagagaatgagttccggaaactttttttttttattttgagagggagttttgctcttgttgcccaggctggagtgcagtggcacaatctcagctcaccgcaacctctgcctcctgggttcaagctattctcctgcctcagcttcccgagtagctgggattacaggcatgcgccaccatacccagctaattttgtatttttattagagacggggtttctccatgttggtcaggctggtcttgaactgccaacctcaggtgatcctcccacctcagcactccaaagtgctgggattgcaggcatgagccattgcgccggcctgacttctggaaacttttttagaaataaaagactcagctaatagactacgatatgttgagtgcagtgatagaagttccctaaggagagtaaaatctcaacaaatgtgagtcctctttttctctgcaatcctgacctgtgctaaaattggggacaaggccgggcaaggtggctcacgcctctaattccagcactttgggcggccaaggcggctagatcaactgaggtacggagttcaagactagcctgacctacatggtgaaaccccttctctactaaaaatacaaaaattagctgggaatggtgacacatgcctgtaatcccagctactcaggaggctgaggcaggaaaatcacttgaacctgggaggtggaggttgccatgagccgagatggtgccactgcactccagcctgggatatagaatgagactcctcaaaaataaaaataaaaaattggggacaatatcgggtagacaaattttagtttctaaagtagctgaagggtctttgttcaggtggtttctgcctttcagctttgacctttatctgccttgttgcagcccatgcatactcttcctcttccaatattcatacatccacaaatgtccctctcccttcaacacatacacccttcttcaccaacacacacacacacacacacacacacccttcctcttaaagcttattctcaagaaaggtttaagtttgtcctttcagttcaatagccatctttcctcatggagtttgtcaggtcccttcttttgtaattctcctacttgtactctccatccactttatttccctttttttttgagacggagtctcactctgtctcccatgctggagtacggtggtgtgatcttggctcactgcaacctccgcctcctgggttcaggccattctcctgcctcagcctcctaagtagctgggactacaggcacgcaccaccacacctggctaatttttttgtattttcagtagagacagagtttcaccgtgttagctaggatggtcgcgatctcttgacctcgtgatctgcctgcctcggcctctcaaagtgctgggattacaggagtgagccaccgcgcccggctttatttcccttttatctgttctttcatcccttagtcacattttattttttttatttttatttttatatattttttgagatagagtcttgctctgtctcccaggctggagtgcaatggtgtgatctcggatcactgcaacctccgcctcctgggttcaagcaattctcccacctcagcctcctgagtagctgggactacaggcacccaccatcatgctcagctaatttttatatttttgaagagatggagtttcaccatgttggccaggccagtcttgaactcctgatcgtaggtgatctgcccacctgggcctcacaaaatgctgggattacacgtatgaaccaccatgcccggccccttgctaacattttaattttgtttgtttattgtaattagagatggagtctcacgtgtggcccaggctggtcttgaactcctagcctcaagcagtcctcccacattggtttcccaaagtgttggcattagaggcgtgagccatggtgcccagccccttgtttttttttgttgttgttgtttttgtttttgtttttttattgaaacaataaaaaactcctctccatctcatcccacttgctcttgttgcccaggctggagtgcagtcgcgcgatcctggctcactgcaacctccacctcccgggttcaagtgattctcctgcctccgcctcctgagtagctgggattacaggcatgtgccaccacgcccagttaattttgtatttttagtagtgacagggtttctccatgttgctcaggctggtcttgaactcccgacctcaggtgatctgcccacgtcggcctcccaaagtgctgggattacaggcgtgagccaccatgcctgaccgcccagccccttgttatttaaatctttcctcttccactggctctcatcagtccacatgaatgtgcaaagctcccctcctgaaaatagaacaccacattacatgggtctccctgtctgtcaccgtcctaccttttctcatcatgacacctttgcccttttctccacctcttctttttggtgttaacacagccaatactgtaggactgcagtgctaaagccgggcagcaagctcactgcatttgcacttctccatgggaaatgcctcttgtgaatcttaaacatcatcaaggagcttagccacatcttctcagccctcatcctctctccccattttaatccttggccatccttgaaattccttctggcccagacttcttggtcactactcagtactcctctctgagtgcaccttgctaggtttcttcactagctcctctccctctacccaatcttaaacaatatttttttctagttttctcttattggtttccttactttctcatccacacattcttagtgatttctcccacaaacacaattatgccatactttctctcgcaaactccacagcagcatcgtgaattgcttgctgaaacataaatgatcatcacctccaataagcctcatttagttctgcaactttgggttttgttttgttttgtttgttttgttttttgagacagagtcttgcactgtcacccaggctggagtgcagtggcaccatctcggctcactgcaacctccacctcctgagttcaagagattctcatgttacagcctcccgagtagagactgggtttcgccactttgggcagactggtctcgaactcctgtcctcaagtgatccgcctcagcctcccaaaatgctgggattacaagcatgagccaccacacctggcctgcaactttgtacaactttctttctttcttttgagaaggaatcacactctgtcgcccaggatggagtgcagtggcaccacctcggctcactgcagcctgcgcccccaggttcaagctactcttgtgcctcagcctcctgagtagctgagactataggcgtgtgccaccaagcccagctacttcttgtatttttagtagagatggggttttgccatgttgcccaggctggtcttgaactcctgggctcaagggatccatcctcctcagcctcccaaagtgctgggattacaggcgtgagccactgcacctggccctgtttctttcttgcactgtcaaacaacacattctctgcagttattatcctgggttgtctggtttgatcatatcactcacaactttctattgcatatgcagaaaaaattagaattcctcaaccaggtatctcatcatcactgtcttcctctccatctcgtctcacctgccaaactcaaagccattgatttgactagtctaaatgtaggcctggacgtatttgacatggggactatttgaaatggggactatttgaaatggggactatctggcaaaatctgggatgggatgtaagatgatcgcaattgcacactcactcctagcctggtttctgttagttatatgtctaccccctcaactctttccaacctctttcttgtcactgtttcctctcacaaactctagcacagagttttgaatttggtagttacaccacaaaatttttaacttgtcagaaattcatttatgattatatgcaaatgacttgtgttgatttaaagcagtagttcccacaccttttggtctcaggacgctttgcacttctgaaaatgaggactatggagacctttagtttatataatgtattgggagttaaaaacagagatatggttacaaatcaagcatccacaaatacacattccatttgtcaccagagtgatgatgtcattacatcctgtagcctctgcacactcctgacaagtggagggtgaaaagggcaaataacatcttggtgtaattggaaaaatagttgtaacctcttgactccctggaccatactcgtaaagccactgatttaaatattatcactcctatgggtgtctactctttcattgggattaaagattgatgccaaatgaatacattttccaaccttgaattttcaaatcagtaagtaagatcagggacatccaggggaacaaaaacccttctcagtgtcctgggatttctctcccagtggctgtgagactgtactcctggaggtagggggcatcagtgagaccagggccagtttgaggacagcacagatgtctctaggtaactgacaaacagacacaggtttccctgagtgtcagcctctgccccctccctaacacacactcacattcacgtacacaataaatcaccctggagtgcgatggaaattccaagaacttcagcattgtcttaacctgtgttctggtgccatcctgagccttgaccacattgactggcttttaaagtaggtgccattgcattcattcttctgagatcaatatccctctgggtctccccagcagctatggtctttctgcttggccccaagacaattaagagaattaatggggagaccatgtccaaataaaagactggagttattgctttaacgtgcagcaactccagtatttgcattaaattattatttgctttgtaatatttgatcaagctagggttagggactagactgacttttatagaagagtgatgcactctaacagtgactactatttattgagctcaagccttaagttctattcatttattagctcactaaacccttacaacaaggggagtggggagggtcaatattaattagaatttgactgcagccagaataaactaaagctcagggggtttagttatttgcccgagttcacactgatctgctggccactggtggagcctgtttctgtaccagacctgtctgattttgcacctccttaccctttgctctctttcttttttttttttttttttgagacagagtcttgctctgtcacccaggtgggagtgcagtggcgtgatctcggctcactgcaacctctacctcccaggttcaagcgattctcctgcctcagcctcctgagtagctgggactacaggtgtacactaccatgcccagctaatttttgtatttttaatagagatcgggtttcaccatgttggtgaggatggtcttgatctcctgacctcgtgatccactcgcctcagcctcccgaagtgctgggattacaggcgtgagccactgcacctggccccctttgccatcttagttattgttctcatcccatattcctgtgtctaacattttggtgtgtgagtgtgtgtggaggactgatgtgcacatgtggagtggggagcattggtttgctagaattttctagagctttttattcaaagtgcggtacatgaaccaccagcattggtttcattagtcagcttgttagacatgtagaatcacagtcccccgaactgctggatcactgtgtattttaacaggacccccaggtgaactctaagtgtgttcaagtttgagaaacatggatcttgagcacagttgtatctctctgaacttttttgagagaattaagtgaagccattagtagggtttcctgcatagacacatattcaacacctttagtaaaaaacaaaaagcccgcttcttaaaagaatatgctttactttgaaagtttgcatttatgctatcttgtctatttaatgctatataatttcagacataatatagtaactctacaagacctccttccctgtataaaaagacgcactataagtttttgtagtcatctttgaggtctgtctgtagtgtgctttattaaaagcgagcaaatactgaaggatcccatttaagtatgtggtctgcggtggagtctaatttgtaccactaggcaaaggtcacacagaggagctcgttaatgcacttactccgggatgaaatcaatctccatacttcaccatattgatctgatagctcattggcgcttccctccgtgaactggttagctcacgtgtgaatggagagagatagatagctttctgggcctgagaattctagctggggtgccatccagggcaaaaggtggatgtttttacatcctcatttgggtggcccttttggtttctggtgttaggctcttgtgctggtatatcagttagtcagaaaaaaaaaaggttttaaaataaataagttgcttttctaccatgggtttattctttttcttctgtagtttttatgaatcatgtgtgctcaaaagtatggatcacatttatctgaatacaggcagatgacttgctttaaagtgtaacattgatattactaaaagacaggtcttttttttttttttttttttttttttttgagatggagtctcactctctcgcccaggctggagtgcagtggcacaatcttggctcactgcaacctccgcctcccaggttcaagcgattctcctgcctcagcctcctgagtagctgggattacaggcacatgccaccacacccagctaatttttgtattttgtatttttagtacaattagacttgtagttttagggatttcaccatgttggtcaggctggtcttgaacacctgaccttgtgatccacccatctcagcctcccaaagtgctgggattacaggcatgagccaccacacccggccaacataggtcatttcttaatgaaaagataacctgctcagtgcaatcttcaggactcaggagtctcccctatgttcctttttgtcaaaactcaatgctattgatgtatatatgtggtcatttaattgcagaaacaccaaggaagtagggcttggtgaatccggctcataaaacacacacatgggtactaattccttgaagaaatgggccaaaataattctagaaatgaggtagaaacaagccaacaagccaaatatttccaatttttaaaagatgtatagattccagatgcaaactggataaaagcagactcagatcccttctaactttgagacacggttttccagagaaactatgaatattgagaaaacagcagcctccaaagccgccaagacttgatattttcattacgcttggttacaagctcgttgaaaagtgtttccggttcatccttgaatctcttccaatctaagcacaatgctgtgcacatgagcaggtggctttgtagtctatagactcctcctagacttccttttcctagattttaagtcaaattttgcctcgaggaagagtttgaagctcgagtctgaggcaagtatctagcccaaactttcgcaaaattgaattaacctcattctttggatgggtatttctaaatttttaaaaatttcttggccgggcacagtggcccacgcctgtaatcccagcactttgggaggctgaggcgggcggatcacgaggttaggagttcaagaccagcctggccaatatggtgaaactccgtctctactaaaaatacaaaaataaaaatacaaaaatttgctggttgtggtggcacatgcctgtagtcccagctactcaggaggccgaggcaggagaatcacttgaacccgggaggcggaggttgcagtgaaccaagatcacgccactgcactccagcctgggcaacagagtgagacgctgtctcaaaaaaaaaattggtttttttttttctttttttggagacagagtgttgatctgttgcccaggctggagtgcagtgacgccatctctgttcactgcaacctttaagcaaggggtttaagtgagtctcgtgtctcagcctccagaatagctggggttacaggcgcgggctaccacacctgcctgatttttgtgtttttagtagagatggagtttcaccatgttgcccaggctggtcttgaactgctggactcaagcagtccattttttgcaacctccgaaagtactaggattacagatgtgagccaccacgcccagcctggatgggtatttctaaaatacacatctattaaatgccacttttttttttttttttttttttttttgagaaggagtctcgctctgtcgcccaggctggagtgcagtggttcgatctcggctcactgcaagctctgcctcctgggttcatgccattctcctgcctcagcctcccgagtagctgggactacaggcacctgccaccacgcctgacttattttttgtatttttagtagagacggggtttcgctgtgctagccaggatggtgtcgatctcctgaccttgtgatctgcccgcctcggcctcccaaagtgctgggattacaggcgtgagccaccgcgcctggccaaatgccactttgaatgtcaaaatatgactgttcttcagatgaaaaaatagcctttttagacaccaggcaccaaaataactttcagaaaaagtagtgttcttctagagttctcatagatagaaaagaacataaaggaatatgttaaacataacaagaagactggacatatttgtaagattccaaatcttaggatataattctgtccccagcctttgtgaagacagatggtcacaatgaggaagagggtatagtttacccttcaatcaggctccatctgacctcctttttaataaaaagaaaaaaaaaaaaaagatctcactgtttcccgggctggagtgcagtggtatactcatagctcactgcatcctcaaactcctatcctcaagcaaccctcccacatcagcctcctgagtagctgggactataggcatgtgccatcatgcctggctgagctctttttgagtaattgaaatagcaatgagatgcccagagtcctcagtttgaactgctgtgttcagcctagtgagaaatgcataggcacttcagataaagtggcatgagacttcagggaacaaatatagaacaatgctgcacaaattcacctgaccttgagcacctggctggatgtccattggtgaatgttgttagatactgtctcctacgaatgggttatgattactacttggtatcttctaagtaaaagtccttaaccatcaccaagtaatatattttttttttgagatggagtctcacactctcgcccaggctggagtgcagtggtgccatctcagctcactccaagctccacctcctgggttcacgccatcctcctgcctcagcctcccgagtagctgggactacaggcacccgccaccatgcccagctaattttttgtatttttagtagagacagggttttaccacgttagccaggatggtgtcgatctcctgaccttgtgatctgcccgccttggcctcccaaagtgctgggattacaggtgtgagcccccgcgcccggccagcaagtaatattttttaaaaaattttttggcagtgaaaagtctaatgagacataaagaaataataggaaaagtactactagatgggcctgaaaatgctttggttctctaacttgtgtgtaatggccaacatcattaagacaaggacatgtgacagactaattttgaaaatttattctcatgttactgcatttttgttattctagttatcaatctacacccataccacaatgctgctttattttgtttgtttgtttgtttgtttttgaggtggagtctgtcacccaggctggagtgcactatcttagctcatggcaacctctgcctctggggttcaagtgattctcctgcctcagcctcctgagtagccaggactacaggtgtgcgccaccatgcctgactaatttttgtattttgaatagagatggggtttcaccatgttggccaggctggtcttgaactcctgacctcaggtgatctacctatgtcagcctcccaaagtgctgagattacaggcgtgagccactgtgcctggcctgtgctgccttcctgacactcaaacacaacagggtatgagttgtatgatcagctatggaaaacagactgtggtatgtatgtatgactgatatgtggtaacaacccttctctaggcctgtatctgtctacacaagcagaaactgttggtcagttcaattaaaaaattaactgatttaatgagttggctgaattaccttattgtttgacatgagtcaaccagcccactccagcaaaacagccaaccaactcagtcactctgtagaagcagcgtgtcattgaacaaccaaacacacagtacatcgtgcacagcataacgatgcttcataaatgatggactgcatatatgatggtggtcccaacatattataataatgtatttttactgcccattttctagtaacacaaatacttaccattataagtattgcagtgtagaatagtaacatgctgtacaggtttgtagcccaggagcgatagactattccatatagcctaggttcatggtaggtgctaccatctaggtttgtgtaggttcactctctgctgttcacacaaggatgaaatcacctaatgatgcatttctcagaacatgtccccatcattaagcgaagcatgacctgcatgcatgagtaattatgtgtgtgagaagccatgagaatacctctagaaacacaattcttctttctctgaaaaatgctttccctcaaagaacagtgcatgctcatggaaaatgtaaacgatttctttctataaatatcaaacccattttctctgtgattcatatttcaaataaaacacacacaagatcaacacttaaattgggtattatttctttttttaaaataaacctttgtcagaatattatttcttctttttttctttttattgccactcctcctctccagaatattattcctactgtgtgaaatccaaaggcaatgggaagggatacagttctgtctctctcccttcttacaagggagacaaaagaactcccttcgtcactcacctctgttagaaatgcattcctttaatacaaagagtatttctcccattttatgatgagaataattgggaaaaagaaattcaatactttatctttcacttctcagccacctttggggaacttatattttgtatatcaggatggctgtgctatgcataacttcttacagatcttgatatgctatctttcatcattatattcagatataaacccaatagttgtagagattactaacagtgagtaaaggaaaggctatctagaaatatggaagacataaagggattgtcttgggactgacctacagagtccttgcctcatggggacagattcaacagggcaatgctgacgtcttaggaagggagtgtgtaggcggtgtgtatgttgggtgggaatgggaaaggcagtatagtatcatagcctgcatattcttctcctttaatctagaataggaagaatatgaaagtagaggtaataagaaatatgccataagacacaccctcttcagacagtgcaaaagagctaggtgtggttttgctaaaaatctagctaatgtgattctgatttcaaaatcattaccttgcagcttgtgtagaatgttttcccctgtttaactggccaggacaaggaaactaaaatatttgtcaaaacttgtgccttacaatgttgtaaatgatgtttccatgtccctccttttgagatttaagctatctagtgggagtgggtgcccatactccaccctgccgagctgtaagcaattgtaagaggggccactgacaacttcacctctgagtcttctgggactgagacccagaataaatgctaggcctcagttcatctcccaaacagaatcactttctcttgtttttcccccaaatcggaaggagtgtctatctagattttatgtccagataattccaaggttctatcatttggtatctatggttttgtattttgtaaacttccaaaggacttcatttcccaaatcacaaatttctttacatttgaaatagagaaatcaaattatcattaatgtatttctttgcaggaaagaaactgggcaatattatattttaaaaaaataacttacagaaaaaaataggaagattgttctttactcttatatgaaagaggcatagtgaaagagcactgggcttggattcagaacacctggattcccatcctgtttctggcacctgagtagccttatataaaccacagcccacctagcctgagtttcctcttctataaaatgatgtagttgaacgaaatgtagctatcagatactttcagcattgattcagcaaatattaattaagcacctgcggtgagcctagtaccagggtgtgattcagcatgtaacaggatgggggtgtccccagtccaggtaatgaaagggtagaccattcacagtgtcaaagacagaaaactagataggacctattactcttagcatgctatgtttagggcactggcataaatatttcccactaaatattctacactatctagaaatttttaacaaagcaaaaattgttgtttacctagacttaatctttctgtagtttagggccaaacttcgactgttggagctccatcttcaattgctactactttctatgaatccatttctgggaatctctgaaggcatagactgactgtacacttagcactgtgacattaaggggacatttaaattgtgtgaagggacaagtcctctacttgtccctggggaactgagcagaggaattctcccaggagcctttgtacccagagaattcccatcactgaacagtccttagggacctctcctttacctctgccctaatttcggttgtacttttggtgagtaatatttaggccactcgaattcttttctcctttctttggccaactgcctgatggaagcagccagccaaaaaggacccaaggacattttagcctctataagcctttttttttttttcctggctttgtaaagcaacctatgaaggaagaagttgcattaaatgacctcaagggagccacggagcatgccctctggaatatccctcaccttctccctttcttcttaatcctactatgccaaggaccttcattgtgcatctattttacaagctggagggcaaccaaaatcttccttaatttatgccataatcactgatatccagatgatgggtctgctgcacacctggatttcttttattttattttattttttgagatggaatcttgctctgtcgcccgggctggagtgcagtggcgctatctcagctcactgcaacctctgcctcccaggttcaagtgattctcctgcctcagcctcccaaatagctgggactacaggcacgtgccaccatgcccggctaatttttgtatttttagtagagacggagtttcaccgtgttagccaggatgatcctgatctcctgacctcgtgatccacccacctcggcctcccaaagtgctgagattacaggcatgagccaccgcgcctggccacacctggaattcttttttggctgatggcattgttgcctttaaggcggtgtctggaaaatgagaattacaaacataacctcattatgctattagaaaaatgaccatcatattcacaactgccttcttgacattccaagcaacccagaggaaaatatatcaagctgagaaggattctgtttttattacttgaatattatctgccaggttagacatgtgagaacattgctttaattatacataagagatttctaaactggagaacaggaaacaggtagtggtcataaatgaaacaatacccagaaagagaaggcactggaaaatatttctcattaatctactttaaaatatttcttttctagttcatgaacattttgcatcacctgaaatattttccttcgtacttcatttagcatctttcatattttgcctttatttatttatttatttggatttcagtttaagtatttttaacaggatgtctgctatgtggtgtttttaatagggtgtctgttaagttttagttctttgcccaaagttacctggttagtgagaataccaagatgggtgcccaggtctctgagctccaaagctatgcatttccttatagtgtttagcagccctggcatctgctataatggagcctaaaatatatgcattctctccatgtctgtgttgtcttggtttatctttgtaataaaacagaccattagaaagttgtgctctaggaccaaatcgtcttggctcttcttaacattgccatcagcgtacactgagggcattcaaaagaacactctctgtgaggctaaatattgtatctactgtggggatattgttagagccctgtttacataatctggaattctctgtcttggaaaaacccacaaattttgctcaggagtccagtagtaggagaagatgttttgcaaaaaagtgctttgattgttatctcatgtacaaaaagaaatcatgtcagtaatgggctctggctacaaggaaccaaattgtggctcatttccaacaactgaaacaacccttatggagcttattttggggctgatcctgatccttggctttgacttattttcctgcctttatttccctttatcctcatgtcttcatttatcccattcatcttatatgtgagtttattcatctcacatgtaaactgcttccaaatcttttcttaaggatgtgacattatccatatctatatatgcatacatacagatatttactgttgaattattgattccacagagtgtaatactttgtatgcttcctgatgcactaagtattttgcagggctatgtcttgttggtccaattcatttataagttccttgaggataacaactaggtgttatattcattcaagtcttgagagtccccagcactaatatatgttgttcgctttattgttgattggagtatatccacaatctgagaagataaatgattcctaggttaaacatgcccttgtacaaatcatcctttttcataccagtgtcaaaaaatcaggggctaggtaggctatgaagtttgtcaatacacgaattgctatgttctttactttgcaacttcatgaaagagtcaccctactgcactagctgaatcatcatgttgagcacaactcttaagggaagtatgggaaagctaacccaggagtggcagagacctccttttcctcctctatcttaacatgtgtacatgctttgactttgaagcaatggaatgtgattgattccataagccactttcaaaaatagtcccattacctgttagtgctcaccttaatcagatcatataaattatatgtggctatatatggaaacttaagaaacagaaaagtctaccaggactgcggtgacaaaattcctgagtccccagatatgatgaacttatcattagtttgtaattaattgatatttcaacaagaagctttttgaaacgtggttaagaggaagaataaaagctggccaaactttgtcctttggtttgataaattctgagaatgtagctataattctatgcaaaagaagcagactaagttacattatataccctggtgattatatgtttcttcacagtgctgtttaacatttacatacaatactgtaaacctcaaagatgtcactcacttatgtaattacctcacagttatataaatgaaaaacctgacatttaataagtgacactagcatatctttatataaagtagtgttacatttaacatccctggggactaggtatatcgtgtataccatgcggatggatgttctggatgaatgaaacttaactttggaaacattgcactttgaaagaatttttaaaatttttgataaagactctctaatacaaatcgcaccattccatgactttttaaacagaggatttgataagcctgttcccaatgacttgtcatggttgtgaatgctcactgttggaccctaggttacagagtggtttctttagcggttcctgaagtctaggcctctgacttcctgtactgagtgactctggattgagctgttcaagaagcagaggaccagcctgttttgctttctgtctaccccttctgctgacagctatcatgttcatttcccaactgctgtgctattcgttcactttacacctaaacatgtgaacgttgggcaggaccgaggaggccctgcttccatggagattaaggatgtcagcagaatgacagccactaaactccacccctacctctgctttacttccaattttacttccctttactcccattcccaatttatgaagttcccaaaatctggccccaagacaatgaaagcttattttgtacaatttaattttcagtctatatgcactcaagttttgaaccgcttactctaagaattttgcacaatccaaatccattaatgcaggttaacatattacaaaaggttacatgaatataggaatgatagtatgggatggagttgatcagggaagacttcctgaaggaggcgccttttagaatggtttctcaatgcattgatggatattttaggtaaggtataatgctatatgccttgttgctaggaccatgaactcttcagatattggctctgctgcttatttgctgtgtgacatttggaaagttacttaacttttctacctcagtttcctcattggtaaaatgaggattataataagttctgcttcattgagttgttgtgaagattaaatgagttcatgcatgtaaaactctttttttttttttttttttgagttggagtctcactctgtcacccaggctggagtgcaatggagtggtctcggctcactgcaacctctgcttcccaggttcaagcaattctcctgcctcagcctcccaagtagctgggattacaggcacatgccaccacgctgggctaattttttgtatttttggtagagaggggatttcaccatgttggccaggccggtctcaaactcctgacctgatccacccgccttggcctcccaaagtgctgtaattacggatgtgagccaccgtgcctggcctgcatgtaaagcttttaggacagtgcctgagagtacaatgtaagggtttcccaatagtggtagtagaagtaacaagtcataagaaagatgcctacagcaaagaggcaatgcttaccaaagaactaggatgtaataagagctgaagttgacatgggaaaggacatttaaagaaaaacttctccatctttttcattatatggctcatatttaaaaaataatatttacatgtcacagcagtatcaacaaagcgggttgctcgcagtctgaggcaactgccctcagtttctggctgctgcaggccaacctaggctagaggagaaggaggcatacggataatctattcccagcatatactgattagggagatctggtttagtgaagattttcgaagagaagtctagggaatttggaagaggtgattgtccaaaggaacagtgtgaccaaaacagatagttgtagtaactgtatatgataaaacagaacaagagggagaagtatggagatggtgtaggtccagattctgggggactattgggcgtgacgtacatgggagatgaaatgaatgaaaactggggtttggtgggaatagaaaagagagagtccagatctggcaaaaggaggttagggggaggtcctttgtgctgcattggagaaacatggaaaggggccagcatagctcagttatccaaggaagtgttgatagataggactttgtattatggaacagcagcagcacaattagaaagcacattggaatcacccccagttatctctgggcagggaagaacttctggttataaatctattgagtattgcaacaattgactagggcgttttactggctcttagttctcttgtacagtagtgtttttagtgcttgtttaatcattgttaatgtgaaatcattttttcttggactttgtagcagtttattatagaggttgcagataatcatcagtgttctttatgaaaacagtaaaggattaatgcagttgtgtgtctgtcctgcccagagcaggttctcattaagatatggtaagttgattttgatttgtttgggttttaatttttctctcccctcttcagaacaaacttctataaatgtcatcattgttacaaaaagagatggaaattcatctttagggatttttttttctttttgccagaaagaaaaaaagaaggaataatagctggacttaatttgtaatgattctgaagcatcttcaaaatcattttctttccttttctatttattttttttgagacagagtctcactccgtcacccaggctggagcgcagtggcgcgatctcggctcactgcaacctccgccttccgggttcaagcaattctcctgtctcagcctcccgagtagctggaattacaggcacgtgccactatgtctggctaatttttgtatttttagtagagatggaatttcaccatgttggccaggctggtctcgaattcccgacctcaagtagtctgcctgcctcggcctcccaaaatgctggcattacaggcgtgaaccaccatgcctggcctttttttacttttttgagacagggttttgctctgttgcgcagactgagtgcagtggcatggtcatggcttactgcaatctttacctgctgggctcaagtgatcctccagcctcagcctcctgagtagcttgaaccatatgcgtgtgccaccatgcctggctttttattttatttttttgtagagataggatcttactatgttgcccaggttggtcttgaattcctggatgcaagtgatcctcctatctcagcctcccaaattgttgggattacaggcatgtgggccaccttgcccagcctcatttttttccctacattatactttgttccaagagcattctaacaggaaacactgagagagaaaaaaaaagtgattctacaagttaaaacctgcttcagcacatccttctctgaccccctaggaagcctccccaagaaatggaatggtataaactactcccgttttccttgtgcatatggcattataataatggattcacacttctgtctcctctcattggagtgtgagtttcatgaaggcagggattgtattttaataatctgttttccctcaagtttctaacacaagacctgacacaccaaaattaacgatcagaaataagaaattagttcatatctacttaaaactaccagtccatattgtagaatgttttctttaaaaatctctttcttaaagtttaatcactggccaggctccgggggtcatacccatagtcccagcactttggaacaccaaggcaggaggataccttgagtctaggagttcaaaaccagtctgggcaacatagtgagaactcgtctctacaaaaaagaaaaaaaattagccggcatggtggtgagttctggtggtcctagctactcaagaggctgagatgggagaattgcttgagcccaggaggtcaaggatctatgacgtcaattttaaaaagcctctgcaataaggaaagtaaaataacagctcacttgctggactattaaaagggaaatgggagggggccgcaaaaaggttttgataggctaaatgtgggcttgacaaagatctacacatttttcttctaattgttggccagattcactcttctttttttttttgagacagagtcttgctgtgtggcccaggctggagggcagtggtgccatctcggctcattgcaacctctgcctcctgggttccagtgattctcctgcctcagcctcctaaatagctgggattacaggcacccgccaccatgcccacctaattttttgtatttttagtagagacggggtttcactatgttggccaggctggtctcgaactcctgaccttgtgatctgcctgccttggcctcccaaagtgctgggattacaggcgtgagccaccatgcccggcctagattcactcttcttatgaaaaagtacaagtttctaatgattaactttctgggttatgggaagttgtgcttcataacaatatgggacttgtattcctttacactctcatctataatatcaatataaatagtttctctgataagtaactaggtttctgagataagcccttccttttattgtagctgataacacacgattatatgaggtggtattgctaaccactagtgagaggttttgctatataatgtggaacttaaacttctttggtcttcttcccagaactgcctagatgccactctaaattgtttattgacagcattaatacctggagaatttgcttaaaagaagtagattatttttctccccttcctttttctacccacacccccataactctgtttttcttaaaaaacaaaaaatcttcaaaattgtcaacattgctcaattgttgagaacaagggaacaagccaggcatcacatttaccctattttttttattcatagagctgcgtaaaaactatgttatccaaagcaccatgaagctgcacactcaccaatttcaagataatataaaataccacataatcaattatggaaaataatgaaatggaatgttggcatagaaaacctcctcggagagtattaaaacaaggaatcaattgctcgagtggcgggggcggcgttgggtgttaaaattaacaatcagtcaagtctttaccaagggccagctgtgggtgcagacctgcagggcacgtgtgagaagggtcagatgcaagttgctgaggtagtcactgccctgtaaagattgtcattaattctacaaacaaacaatgaaagagttgtttgcttatgttgtgggctagatgcacaagatacacagaaaactgcagaagtgaaagtaattcagtcatttgttccttcatttagcaagcatttattaagtggctttttttttttttgccaggcaccagggaagacacttgggagctgtagcttcagaatccgtccctgccctcagggaaggcagaacaataagcaaacaatcataatactttgcgaaagcagggagattataggagatgccgtgttagacacaaaggaagacaggataatgtgaacagcacagaatacaaaacaaaaatgaagtactaattacagaaaacagacaggctcaatttcacctattcctgcaatttttagagaagcagaggaacagaggatatgcagattttgaagtgtgtcctcagcatcctaaaagaaaagaaatctaggaaaagtcagactgttttttgcttgttttgagacagagtcttgttctgtcacccaggctgaagtgcagtgacacgatctcggctcactgcaacctctgccctctgggttcaagcaattctcctgtctcagcctcccgagtagctgggattacaggcgcctgccaccagacctggctagttttttaagagacggggtttcaccatgttggccagactggtcttgaattcctggcctcaagggatccgccagcctcggcctcccaaagtgctgggattacaggcataagacatggcacccggcctcagattgttgtcttacaattttagtatggcttaattgtggcaaggtcttgttaccgtaactatttctgtcaagttatatatgaaggacaggaaccatcaaatgcaaatgaagaggaagaccccttgatgagatggctctagaagacatacgtgtgtgtgtgtgtgtgtgtgtgtgtgtgtgtgtcagggtcttgctctgtcacccagcctggaatgcagtggcacagtcatgtcttacttcagcctcaacctcctgggttcaagcagtcctcccacctcagcctccggagtagcaggtgtgtgccaccacacttagctaatttttacatttttttgtaatctccctatgttgcccagtctggtcttgaactcctgcactcaagtgatcctcccacctcggcctcccaaagtgttgggattatggctgtgagccaccacacctggctgacatacttctcttaattttcacccaccttttctccttctgttcatggccagaagatagtctcagttcttccatttttccacctgcaaaatgggaataataaattttcttgtataaataggttcttaagctggaatcctttttaggtgtccataaatagactttggggattctacagtcccccacccacttagaaatttgatgcaacattaacatgtatggtaattgtttctggggagccaatttcaaagtaaagtattttgggcttccctgaaataagtgctaaataaacaactaatacttcacatcacagaacaacataacaaaaccaaattaccatcatagactaataaatctgaaataagatgctgatagtgtatgagaatataataaaacccagagagagcaaagtacacctggctttgaaatcactccttagcacctgagaggatcagttcctggaatctgctgtgtatgcaatgacatgcatattgctaggacgttaggccacagctccttgggtcagctgtgggcagggaacatttgggcagatctgcataagctgctgcccaccacctggattgtaaaaccacatgccattctggagactttccttcaaagaaaaatgtgaactctcactgtccactaaaccactaaatactgtttgggtgaacattctcccgcaccagaatcattttcaaaaaggcagtgactgcgtttatcttgtccacccttatatgctagggcctggcacttataaccaccaaagaattggctctcaacaatagctatttacttaatgaatgtaactgttttggtcagaacatactggtttgaaacatttctgatggagatgtgctgggggatgccttttcctgatcacagagcttgattatagcttcaatttctgtaagtaatttctttttctcttctaaacagcacttacatgatcctccagttgggagccttctgttagttgttatttctgcatttgtgtgttgctttacacttcacaaagggctttcccatccattatctcattgcatcttcacaagacttgccccatatatttttagccgagaaaatataaggctggagaattaagtagcttggccaagctctcatagctagaaagtgtggaactgtgcctcaaatccttgtttttgctctgtgtttggtggtttcttgagctcactgtgtcctgaaattgtggaaataaagttagccagaaactcttatcactactaatatatcagtgacagctattcagagtcttatggaatggccacataaaaatgaatttgataaagtgaattaaatgtatttgttttataaaattatagagcctcttgatataatttggagacagcctagattgtgagagggagaatgagaattcttattttgagatggaatcttgctctgtcacccaggctggagtgcagtggcatgatctctgctcactgcaatctctgcctcccggattcaagtgattctcctgcctcagcctcccaagtagctgggattacaggtgtgcacaacgatgcccagctaatttttgtatttttagtagagacagggtttcaccatgttggccaggatggtctcaaactcctgacctcaggtcatctgcccgcctcagcctcccaaagtgctaggattacaggcatgagccattgtgcctagccaataagtctttagacatacccctgaacctctctgacacccctgttttctcatctgaaaaaatggataccagttctgctaacttcaaaggcatgttttgcatgtcaaatctaaaatacacaaaactcttaaaaatattacacaacatataaatggcagttgctttttcaataatgtatagtgtatgtctaaatatggccattgcatttgggtacaccaaggtttttgtccggtaaacatcacaaaacaaaaagtaaactgatacaaatagctatagaaatggataaatatgctgtccatatttaaatacgaggactggacatgagacagatgtgcatttgtcattgaagaatgcagttccctggcggggaaggtggaacgtgcataagatccccattataatgtagcacttttcattgtaatcctcatagcaaccttgtcaggaagatacttactgttcttgggcccgtttttcagatcagaaaactgaagtttagagagtttgtggcaaaattgtccaaattataaaagaaattccagttagcaccgacatcatgcttggtgagtgttctcttcagtccagcacaatcggactttcagttaacactggttacaaaacgggctgtgtgtctttgtctccaaaagtcctatgggctgtaatgctaattttcttttatatgaattcttttggcttggcagtttgctaatatctgtgtactatttcagcttcactttaatgtactgtattcacttttagatacataagcataggcaatctggggtcattctaatggagcctactcaggacaacctgaggcacctggacctaactctaatagctctattaatgttaggtagaccagtttaatggagtgcattctcctagcagttcattgattataaatacttagcttaagtacctacgtgtgtcctaaaaaaactatttgtccgaatgaaaatcctgattttcaggagcagtgatatgaattctgggcacctgtgcttcagtgaccatgggtggagactttcttgtttatatgtagtcctcttatgttgaaaattacacaaaaacaaaaaagtagtgaataacagtgtcattttttgttttttttgtttgtttgtttctatttcttttgcaggttgatgaccaaatgaagctgcttcagaactgctggagtgagctcttaatcctcgaccacatttaccgacaagtggtacatggaaaggaaggatccatcttcctggttactgggcaacaagtgagtgtagagaccaaaaaaaaaaaaaaagcatctttttattaagcatgttcagaatggccggaatttaactaggtcagaagcactcttgtgctttgaaagggagagattggctgccaataatttagaaaagatgacttggtgcactctgttcctgctctgattattatagttaaacttgtaaaagcaaacataatcatgaacattctgctgcttccagtctgctgggactgaaagtcctgcttacaagggtccgaagaactggtaaatgaaacgtaatgattagtacccaggttttctttttcctcgagcttctgctttaacccaagacacttgtttgtcagctgttttaaaaccttataacttgtggagtccttactattttggaaaaatattggtgaacgagatggatttggatgtcatgaataattgaaatagttggtataaaggcaaatgagaagggaggggaatttcagttttcaagatccagtcattcaaatgaaagatagagagaataaaattactgttaggtcctacacctttctgaacagatgtttgttcgatcaacaaaaatttattgagcatcctactctgtgctagttactttttgggggctttggtgtatattagtgaacaaaataaaaaggttcctgcccctgcggaacttaatgttgtagcagggagaagctgacattaaacaataatcctaagaaacaagcctgtaatatgttaaaggtcaaagtgctactgaataaaagaaaaaaaaaaaaaggaaagaaccaatgaaaagaaaatcaacactcatccacagacatgtgttgcagtgtgacccataagttgcactgtgaaataggaatggttggtttggctttattggaaatgtaacatttgagcaaagtcttaaaggaggagagacagctttgtgaatgtctttggagagagtctacttaatagacctaactgcaactttacaggaatttaggcaagtctctccagtttcttaaccctccgttctacaactgatgtgctatttaaataaatgtgtgggacacagtgattccttcaatcctttgggtcatacctattcagggtcccactgcattgttcagcaatggtgacttcagtactcggcaccatgatcttttatgttcagccataaatgtttatgtgctgtgaaaccacagcaatgctatttggaaatgaagggctgtctccacatcatttgctgtattattaataaatcaaaatttcccaatcaaattaaaagcaagcactatttcagagtttttgcaaattgggtcaattcaagcatctccatcactatctggtccttgctatctgcacctctcaggagaaaagcgttgcagaggagaaaataaagtctcaatgggtttgacttcctgtgctttcaaattttttttggcattttcattctgggacccaagtctttggagaaaatgtacccattttcagagtctaatcattgggtgtgcctcccaccttcaccgaactaggagctgcattggaagtacaagactgggcccactaattaatttgatttcatttccttctgagtttcagaaatgaaatgggtttgtgccgttctttttctcaaagcacttccattcctgctctttagaaatatttcttatttcacatttcattttgccttaagtgctgcccgtgggtgagggtaattactatttaaaaaatagagaaaagtgcatttcttgctgtctgattttcaaaaccaagaacaatcaaggaatggatggtattatagttttttggatcaattactggtgctttgtgttttgtcatcagaactgaatgaggaactccatggtggagaaatagttatttccttatatgtttcctgcagcctggattcttccagctcccctccccactctttaaatatgtttcctgcagcctggattcttccagctcccctccccaccctttaaagtgtgccacaggtctgtcagaacccctcccttcacttttttcatccagtccagtggctaccctagtaatgattaattgtaatcagacattctcatttatggcaattatggtagacatgtttattttcttttgcggaatatctagacaaaacgttttgaatttatctctgtgcttcttgcgtttcataggatggaagcaaaagtgctgcaaaggaagacttcaaaagcctgtaacctctctatcagaatgagacagatatcttaaagcagggtcatatacatgtacttcttttatatcctcacagtacctagcacaaagctgaatatgttgggcacatgatacatattacctgattgaactaaatgagaactattgtatctctcctggttgcttgattaaaacaaattaagtataatttttttgagaattataaatacttccctgagtgtaaaaatgggaaaattagatttttgctacaacaacattactttgtgtacacaaattttaagaaggtagttaaaacaatgatgagtggaaggaaaggaatatattaagtataagagtaaagcaatatgctagaggaaaagaggatttataaaaaagaaaagaggccgggcacagtggctcacgcctgtaatcccagcgctttgggaggctgaggcgggtgggtcacttgaggtcaggggttcgagaccagcctggcgaacatggtgaagccccatctccactaaaaatacaaaaaaattagcctggcatggtggcatgcgtctgtggtcccagctacttgagaggctgaggcaggagaatcgcttgaacccgggaggcagaggctacagtgagccaagatcgtgccactgcactccagccttggcaacagagcaagacgccatctcaaaaaaaataatagaaaagaggtggaagctagaagatatatatatatatatacacacacacacatacacacaaatatatctacatatatacatatatatacacatatatatacacacacatatatatgatatgaaagttgaaggaggcagaaaaaaaagaaaaaaagaactgcttcctgttatgtttataatccaataacaattgagctgtggttagagtatattttcttcactagtgcagaccatgtgctctctggtgtgtgtgtgtaaaattcacacatacaggtgtaatttagaattggaacaacctgttttcgtgtctccattccaaaacttcctggctgtgtcatatttagcaagtcgctttaccttttgaggttcagtgtcctcacctgtccagtggcaactatgatgttatctaccagagagaattgcagtaggaattacaggaagtattctgtgaaatgctgacacaaaaattagaagtcatcaaaactaggccagcgcaagggtgacatttatggagtcaacaaccccacgaagaaaggactattatccctctttggcagatgaggaaccaaggcaaagaaagatgaagtggttgattcaaggtcaagacccatctagtaagtggcagaacagatggtcagatcgaggccaactagtgctagagtttgtgttctttaccaacatgccataccgtttatctgattaactcacagatgctgcagagcttgccttcacgccggcatttaatatggtcttcatgtgtaattccagtgcatgacagactctatggaaattccaagcaaaacaaattcatttccttttttattgagactaaatggatatgctttttttgtggtttagttagttagtagtttgtttttgggggaattttctatatggcattgtaagcacattgttacagtagatttaagttattcacaagcaattttaatgtgattgttgcttagtgttatgaaattattttaatattaagaaaaaactaaaactatgaaaaaatcactcataatgccaccacttgaatcaactttttgttgaattctcttccaatctttgggggaaaacatgtatcttaaaagaggatttttctcatttttctaaataaaataactcgcctgccccagagacatattgacctgctatcatggatttgtgtggaatgtgaactttcaaacactgctagaagtgtgtttccatgaagcactgtattgaggccatgttgttgatatcatgggaaaaagtaaatggtattaccccaatacagcatgcaaaattcccctaaaggcagcttggtactcacttgtaggagataaatacattttttaatttagttaaaacaaatgcttctgatggcctgataaatgaagggaaatcaaagatgtaaggggaaaaacattagacacagctctgcagccaatagtgataagaggcataattcatccacctaattaatgactgccctttgcatagtgcttttcactgtgtactttcacaggtaagccccattacacagggtcagagaaagtgcggggaaatttcagaggaggaagtgcaaggagaataagatgggtgttctaagctgtccagatgattcagcttctataaggaagtgccttacccctaaagtgaggatatttgattgtactctcctttgtaagttgaggaaaacaccattgcttaaaatccttctaggtcagaggaacagtgacaggcaattactagatgaaactttaactaaactcgccacctttttcagcctcagccagaagaaatacaattcactcattatagatttccaggtttacttacagtattttctcaactgccctgttgagaaaatgattacttctgaaacaaatgaaaatgtttatactgagtattttgagattggcaaataggaatattaaatatgcctcagtccacaatatcaggaatgaagtcccaacacaaagggaacaccagacagtgattttgtttcaccttgaaagcatgtatgtcatgtctacacattgctttatagtgaccctttggacagacagaggaatgcaagaccccaggtgttccgtagcccaatcttctggctttttcttactaaacacagctcactgtaaataatgtggtgaatttgtcatagcagagaaaaaagaaaaagactagcctggattttaaaaaatgagtgactatccaggaaattgctccttggagcttgaaaagagaagaaatataaaatagcacagcctttctcttaagcccagtggctcacaagtttgcttaataaatgtttgcagaattgaactatgtctgttcatagttcattcagaactagagaaaccaaaatagccccactgcaaagagcagcccaggacaccagtacattgtatattgaaatgaggattcagtgtttcacttaaccctgtaagttagctattatgttttaattgcgtctttgaatcaggcatctacataaatgtatattaaatagccttgttaagcaaaaaggaaattatgattatcagtaatattaagcacttcaaatgttctatatagtcgcaacttagttatgaaaagaattatttcctatccaatattttaaaaactacacacgcacatatgcacacatatatctatgtatgtataaaataataatgtactttgaagtggggtcaggttttagtatttgcatattgttgctaattaacagccactgtaacatcatcctaagggaaaggtctactggcaacttattatcttctattattgtgtatcatattaaaatgacaggcatcttataatatacaagtcatcaaaatttcagtgattagaattaaaagcaatttaggtaaaactgttttctactttttcatgatgagtgaaatttatctaaaggggacatcagtttagagtattgcttcaatatctcccttgaatttaatgacacaaagattacatgtaagagagcaaaaaattaattttactaagtacataaaagacaaggccaactgctcctgaaatgagcacaaactctgcattcaacaatgaaaatataattatgtttgtaataaaatgtaaggaagttggagatctgaatgttgtttcaagaataaatcacctatccttctttagagctgtgcaatttgataaatatccttgaaagaaatgttttctaagcccccatttaataagcatgtttgagctttcaaattagcatgtaaataaatgtatagttataaatttgttggtaaaccaattgattttttgaggtccatctcactaaaggtctctcactaaatatataatcctatgaaacagattcctttccgttatagtgtactacattttcacatatgaaattcttgtatttgaacttattattatacacctgttagaactatacacaacaatatttaattaactccatcttaataatggaaaattaataccaacatatttgtgtttcattttagtatggtcttcctgattcaggccttaactagtgatttttttttcttttcttttttttttgagagaagtcttgctcttgtcccccaggctggagtgcaatggcgcaatctcggctcactgcaacctccgcctcctgggttcaaacgattctccagcctcagcctcccaagtagctgggattacaggcacttgccaccacgcctggctaatttttgtacttttagtagagatggggtttcaccatgttggccaggctggtctcgaactcccgacctcaggtgatccacccgtctcggcctcccaaagtgctgggattagaggcatgagccgccgcacctcgcctttttctttttttttttttttttgagacagtctcactctgttgcccaggttggagtgcagtggtgcaatctcagttcaccgcaacatctgcctcctgggttcaagcgattctcctgcctcagcctcctgagtagctgggattacaggcatgtaccaccacgcccagctaatttctgtatttttagcacagatggggtttcaccatgttggccaggctggtcttgaagtcccgacctcaggtgatccacccacctcggcctcccaaagcactgggattacaggagtgagccaccgcacctggatcttaactagtggtatttactacaatatactttgtatatattaagctacagctacagcgcattccgttgattccaagcttaaattgttaatcttgtcccatctatgattcttgataatcatagaagtgagaggtaccttattatcatcacctaacttaactgccttacttaaagataaggacaccaagggatggagatttatacgtacttgtccaaggctcttcgtttgtaagaggcagcattggctcgggtctcttacctagtctctggcttttgccaccactgttgtaccatcaggccttcctgctctcattcactcatctatcccattagtctcagtaaaatttgtattattattatctgaagtagttgactatgtgcagtttttaaagaatttatagcataggcacctttttaaagtaaggactttccttgaagtagaaagttcccctgtaagagaactggcaaaatgatagttgagacgtcactttgtgtgctctgcaaataatcccaatgtgccccacagagttcaacagtgtgtcctgcctccttccagctcagggttcaggttgcccaggtactgacccttctttcacacattctgaaacagaaaccacaggagttcttacaacacttgatgtttaaatttagtgcgtagatgccagcacctggctaaagcaggtagacagtgctgtacatgatgcaagagctttcctctaacacacattaactgtggctttttcatgcatagttgactctatataaactgattgacacctttgggggtcatctttcctctgactcataatttttctcactcttgaaaaaggtttctgtacacccagtattctctagttaaagctgaaaattcaactcatcatatttacacaataaaaaaaatccattctgccttgtttttaattgcaaattctactcaagggactagttctcctgcttaggaggcagccctgtgccttctcctagagaagcaagtgcagtcaattatggtaatgaaatgtcaataaatataaaaatttaatacagtctgctctgggtgagtggcagatgaggacttgcctcccagacaaatttgctgctgctgcaaatattaaatgcacctaaaagagtatctggttgcctgagagctctccagtaaaaaaaggatgggagcgtcaggtaccaactgggctttcccattatgctgtaatcgcagcagcaaagccagtgctatcactgacagccatcccaacatcttaacttgttataaattgaacttcttatgtccccatgaataatctaagattggtgcctagcaacacttttttttttgagacggagtctggcttcttcccccaggctggagtgcaatggcacgatcttggctcactgcaacctccgcctcccaggttcaagcaattctcctgcctcagcctccccagtagctgggattacaggcacatgccaccacgcccagccaatttttgtatttttagtagagatggggtttggccttgaactcctggcctcaagcgatccgcccacctcggcctcccaaagtgctgggattacaggcatgagccaccgtgcccggccagcacttttttttttttaatgaaaagggaaataagccttttctttttttgcttccagacaacggaattattctcctaaataaagttattgctgtctttagagagaaacacattaatctgatgtaatctaatgtaatcatctgagaatagcagttttatgtcatgctttttaggaaacagaaaactaaagaataatttatttgtatttattttaaatttttaaattaacacttctgctgttctataaagaataatttaaatgtgattctttcatcatccacaaacatccaatcttgaactatgattactttaaaatgtagtctcataatacaagtagaaatatatctgcctttattttcctcatgcactagttaatattgtatatacatagaacactctcctggattcacttttcatggacagtatgtttttctttcaccttattcatgagagttaaaattttttatcttatgtgatgatgtaatttcataatataaaaaaggcatatatacttgaaaaatttaggtagccaaaacctctttcctacaaagcttatcaaaagtgattatatttatcagacatagtaattctgatgcattttagaatcatggaatgtgcctcaaactacttgcatggggaaaatcccttctgttatcaatctgtattgtggccaggcatggtggcttgggcctgcaatcccagcactttgggaggccaaggccagaggatcacttcagctcaggagttcaagaccagtctggtcaaatagtgagaccccacatctctattctattttaaaaacctgtattgcaatctgattttacccatagttcttacgactcaggtgaaatacatattgctgattctgatagtccttaaaactgtgattctgtattgcaggtggactattccataatagcatcacaagccggagccaccctcaacaacctcatgagtcatgcacaggagttagtggcaaaacttcgttctctccagtttgatcaacgagagttcgtatgtctgaaattcttggtgctctttagtttaggtaagaaatccttttctcatgctgtgctcaaccaacgattgctaaatgatgttgaagttcaaatatcttgtggtccatgtatgtttttgttctatcaatataatgcccttcctgtcaaattatgaaatcttcaaacgtgaatatattttcatatatatttctgcatgatgcatagcccttcagtggatacgttggggaatggaaaatgagttattcaattgactcattcaaatgagtcctggtttttcttccataatatacagataagcaataaccaaataaagctatgacaaaggtttaaaacagacagcttaggaaagatgtatggtatcaaattttagccatctttctcccattggtaatttctatgtgcctttcgtttcaacttgctatttacttctgtttttattcttctaaaatatgaatcgtaattaaaaacctgtatttaaatctctatcgggattaactagagaatgtttataaccagatgcaccactatgcaagtacaaaagatgacagttgtcaaggggaaaggatgattctttaggaaagctttggaaaagaaagataactaagcaagacagattagctaaatcaaggttctcagtgagtcagttgagaaaaatcaccacagcttggaataaaaaaaggattaaggagatggatttttattgacttcaaaggaacagattttcctgtctgtcccttacttgatttctgtattttgttggcttaataaagccaacttaaataaactttttgccaagtccatttattacttattggcagacagctgagggaggcaacttcccttgaatgaaaaaaatgcagaaatcagattcaccaacatatgttttttctttagtcttcagttataagatagttgtgaattcatattctagggaataaaacaataaaacaaactgcaaagtaaaacagatgtgtctactctccaaatttggtactttatttttaaaattcttcttgacaggactgcacaactgttgctaataaaggggtagtttgaagtaatagaaccagagttaatttttcatgtatagtcaacatttaaaataaaaagagcattttcatattttggaaaatgtgataaatacagcaaaaagaaatgttactgaaaatttaaatggacaacagaatttcatggatgtaacgttcaaaggtttacaatgccaagactggatcctgtgtggtttctgtattaaccacaataaaaaggaaagttctgttcaagtaagtctgcatcttttacccgagaacagtgtttagaatgttaaaaaggaagatagcaagcatacgcctgcttgctgtaatcgcacaaattattctggtttatgttaagatcttagtcttttaaactagtgcatttgatcactaattaaatggaaaatgtggtaatatatgtataagaaactgtatagcatcttagtgataaaatatttacagggtcatctcatttcaatggtattttaaattagttgaagaaatgtattacatttgaagatgtacatattaaccatgagccatctttagttttcagcacttttaactttccttcatcatcttccaaaattattatattctctgctaatactataaggagggggttgggctagatctgagatgctttcaacttttgaacctcaaaaattatcttcctgaacaactgggccatgtatttaccagaactttagtcatacactctgatgtttaatgagcacttcgattgtttcaggagcccagtacaccagtgaatagctggcctaaatgtccattaaatccatgtctatttgttgcttaaggaagaaaggaaagcatggctttcagatcagaggcaaatagaattctggccgagagtctatttttttagagaagcaggagaaaagtaaccagtagtaaaattcaagtagtttctaatttgtgagtggaaaaactttttactctgtagaaacagtggctaatcaattttttgaatttcacctttattgaggtatatagataattaactttaggtgcctcagctagccccaaatgctggttttacctgtgattaagggtgaaatcataccagagtcactcttgaaagttaaggccaagtcctaagctggtacctgctgtcccagatgctcctcctgagcctcgagtcccctgagtctgaagcctgctatatttttgtctcagcccagccttgagactctttggtcctggagaaaaatgaagattctgtggactagtcagaggccagggtctattctgagagatgactgcagcagtattctcctgtgagagatgaaacagtgttttccagatagatttggtgagagaaggtgggatgtggtcccaagcgggtgcagcgttccaagctagaagcactaccagtgtgaaagcttaaaggcaagagagagcaaaatgagtttggggaactgttagttgatggatacggcttgagggaagcagcagatgtggctggagacatagacaggagcctggacatggacatgaaagccacagatgcattcaacacatactcattgagtgcttactatgtgtccagcactgaagaaggcactggggctatagtggcaagaagaagtaagtgccatggctttcattctctagacaattaggaagtatagcagtgttcttaaggcgacggggatgcggtgaataacttaagtcgatttgcctttctggtagcagcatggaaagtggactggaccaagaacagtgctagaaaccctgttttcagaagttttatttttattttacttatttaatttttttttttttttgcttttattcctggcatgctgtgatttatttttagaggtggttttttttttttgaaacggagtttcactcttggtgcccaggcgggagtgcaatggcatgatctcagctcaccacaacctccgcctcctgggttcaagtgattctcctgcctcagcctcctgagtagctgggattacaggtgcctgccaccacacctggctaatttttttgtatttttagtagagacggggtttctccatgttagccaggctggtctcgaactcctgacctcaggtgatccacctgccttggcctctcaaagtgctgggattacaggtgtgagccaccacgcctggcctagaggtggttttaatactccatgtggttggactgagatgaaggatacaaaccagttataggtttcaagccacaagatgtggcagagttgagagggaaaagtctagggtgtgtttggggcttctggatgtctagctggaatagaaacatctacaggaacagtaactgatcagttgattcaaagcgggtcccaatagcagtcatcactttctaatctaaaagtcattcttcactaaagtttgttactgctgacacaaaaagctcatgacaggactcaaaagaaaagtacagtggactcaagtccttctagtttgctctctgacgtttcccccctcagattgtatccatgagcagacatcagttgggtaagctggtcaagaaaggaaataagtaaaaaatgccctctcagcacatttctctgtgtataacatcatagattctgtaggcccaatctctgttagttgttagttttaatgttttctttacatttctagcacaatgcttggtacatagtagggacttacaaaatgtttactgataaaaataaataaatgggccaggtatggtggctcacacctgtaatctcaccactttggaggccaaggtgagagaactgattgagccccacgggtttgagaccagcctgggcaacatagggagaccccatctctacaaaataattagccaggtgtggtggcagacacctgtggtttcagctacttgggaggatgaggtgggaggatcagccaagatcgtactacttcactccagcctgggcaacggattaagatcctgtcttagaaaattaaaaaataaaaataaacaaatagtttgaaacttaaagcgaagcctttaccgaagcaactcgtgataggtaataggaggtggtttagctaaaagccgtattcaaatacaggttatttttcagagaccactttttccaaagaactctctaataaataactcctcaaaattaaattatttctgttatcagtttgcattctcccagtttatgagaggagatgtttattcataagctctttgggaaagctaacgtgaagaaaaattagaaagaatattactgactaaaaccaggtggcaaatgcatttctgttccaagcaaatgcaagatgataggctttcagcccatgttaagtaatagtagttaagacaatgttgtacaattctttcttggcattgatacaatcctgtttccagcaaaatgaatggagaaaatgttatatttgttcatcatgatagctctttgcttcatactaaacttccaaattttgaatgtgacatttgattatacacatcccaggtaagttttgtcctcatggagacaaacaccccagggaagatgggttatggttgcctcagggaatgactcaactggcccagacagaaaagctactgcatgctaaatgtcctcaccagcctgtcacctgatcctcatctgcagagaagcaacgggcataattcaagaacaaaactgattgaagagttgcttgtttcatccacaggttcagttcaggcattctgtagtgtctagtcatgatttctttatcttaaaataattaagaacattatcttaaattataaaaggtcatctaagcaagtactataatgtctcagaataaacagtattgtttattaataaaaaatgtgacttgaacacaagttgaaagggattttcaaaatggatgggtaagaccttcagggcttgaaagaactttattttattatttattcttcttaattttagagacagggtcctgctctgttgcccaggctggagtgtagtggcatgatcataactttctgcagcttctaactcctaggctcaaatgatcctctcgcctcagcctcctgagtagctggggctacaggtcacactcattgcctggctaattttttaatttttttatagagacagggtctcactatgttgcccaggctggtctcaaactcctggcctcaagcaatcctccctccttggcctctccaagtgctgggattgcagccatgagtcacaacatctggccctcccttgaaagacctttaaaatcataatttggaaggaaaaaaacagtatttctaaggcagagcagaacatttttctctttgttgtggctactttaaactgtataagtctgaccccaaacaaagttgggggcagggctctatggttgttctggttttctctttttattcttttattttttctgtgctaagtgaaatgttcttgttttcttagtgaagcaaagttcttttatctgtcaaattaataaactgtaaggttcatgaacacagtgtatgttttactcctcatgtactgcctggcatataggcttttaataaatattgctttcatgaatgaaagaatgcctttcctcccaacttctagattaaaaagaaaaaaataatgggaattgaaaataattagctaaaaaaaatgcaagcacaaaatttgaagaaagagagactagaaaacagattctatggataactattagaggatttggcatcttcttttcccctttagaaagtagggagataagtcttcacattatgaaggggatttttttttttttttttaatttttagtacagacgaggtctcactatgttgcccaggctgaactcctcaagtgatttgcctgcctcagcctcccaaagtgctgggattataggcatgagccactctgcctggcctatgaaggggattagtataagtaatgtagagactaaactgagtccctcctctttgcaaataaaataataaatgaaattaattactgatgatcagcatttaggttctatttgaagttgtaacactaacagtgtcaaacaccaaaatgagccatagaaggaagtggtggtgatgcttttcttcagtaatgttaataataaaatgtcctcaggtgaataaatcacttagtttctctcttacagaatgaagagacctaagagaacattctcctccagttttgtaattaaaaaaacaaaactagatgatttatccaacattttaggttcagatccaggtctagaactaataaccccaaatgacagtcagtactttttctgattcagcctactttcctcttcggagacattggatctcatcaatgagcatattaaaaatactgtgtaaagaagacctttgaagacacaggtttgaactgtgtgggtccacttctgctcaaaatttttttttcaataaatacagtcagccctctgtagctgcaggttctgtgtacaaatgcaagtccaaaatacagtatccaaaaggccgggtacagtggctcatgcctgtaatcctagcactttgggaggccaaggcgggtggatcacctgaggtcaagagtttgaaaccagcctggtcaacatggtgaaacctcgtctctactaaaaatacaaaaattacccaggtgtggtggtgggcacctgtaatcccagctattttggaggctgaggcaggagaatcacttcaacccagggggcggaggttgcagtgagctgagattgtgccattgcactccagcctgggcttcagagaaagactctgtctcaaaaaaaaaaaaaaaaaaaaaaaaaaaaaaaaaatatatatatatatatatatatggtatccatcagatgcaaaatccacatatacagagggctgacttttcagatctgaaggtttcacagggtagatggcaggacttgagtatttgcagatttgagtataggcaggggtcctggaactgatcccccttgtataccaagggaggactgtacttactaagacactatttatttatttatttattaaggcaaaatgatataagaaattaggacagtcatctgaagaatgtggacaaaaataaaagcaatatctattggtagaagcagagaaatacttcacctgaatttccaatttttattgaatatgctaagtaattatatagctcttaattcactcagtttctaaataccgtcatccctcagtatatgcagggaatcagttccagcacccctgtttataccaaaatctgcacacactcaagtcccgcagtcggccctgcagaacccgagcatacaaaacattggtcctccatacaggcaggtttcgtatctgtgaatactgtgttcttatctgtgtttggctgagaaaagtctgcataagatgtggactcacgcagttcaaacctgtgttgtgcaagggtcaactggatattgtcagttttgtttttctctatgtgaactctgggtttcagagctccagcaagctcccagaatgcatttgcctcacagctttggtacctctttcttaaagacttcctccttgtagctgattgtcacctcttaggtatgacgttttctttggaccattcactagacattaggaaagccaaatgatcatagctttcgttatatatatgtctattttaggatgtattttaactgcttgtgatggtaaaaggaaaaataataacaaaacaaatagtcattcttttcccctctgacagtcactggcattaaaaatcctaaagtagccaattgcatctctaagatttaggtggacgagctccctggggcagggcagggtggagtgggggtggtgggcaggcagagaggagtgtagtaagtttgtacattctgttttcaagtacagccgtccgctttcctgaagggttcaatcataactcggctcttgcaatatgacactgacattgttaatagtaaataaaatgtttactagctgaaagatttggataaaagtcttttagatagggaaatttatttgcagtggttagttttccaatagtctttagtttctgctataggaatgtttttcttatttgaattttgtccattatttcttctgctttgacatttaaagaaatatctaatgcttcttttccctttacttaagtgtgtgccatttgtcctctggcattcaatatcagaacctggcagaggtttgctgtcaaagctccctatagagtggttggtaaggcaacatgcaaatagggagactggccccataccccaggcccagtcaggacctctgcccagagcttataactccagcacaagccatcatatatgggaactctgtctcatcacttttgagactctctctctctctgaatatatacacacacatacatacacacacacacttcatttgaaaatgaaggctttataaacaagccaagaactgcagagcaactactgatctcacatctcacttaagagacaacagagatttgtaggaatagcaaacattcagccattaagtgaggcatacaaaaggctgctgtgttaacatagcccagaaaaccacggcacttcaatcagaacgtctttctccttgtctgtttttctttaaaagaggacccttcctttttgtccgataggaagtactattctgaatctaccagcaaggctggcatgtgctctcttataaaaggaaaagacttcaccatgcatagcctcttcaccctaactgctcagttgtttgctacccctggcaaggatgttctaattgtgcagtggagggtgtgaactcgttgctttaactgcagttccattagctaatcggagtcctgatgtcagtgtgacattgtggtgtaaatcatgaaggggtttttctgccacttcctgtggagagaaaacagttttgcaggatcacctgatgattggccattgtggggttgtcttcttgaaaaagaaaagttgttctgacctgggctgtgctcaggatgcctacattttgcctttgctaagcgatgaaccccccagaaaggaagtgtatggggggcactgttggagtctgagtgctcccttccctcagcacttctggagaagcctggaaatactgtagacacagttttggagaagagaattcaaagggcttacaaaaggagagtacttttttgtccacttctctagaagaggcacagcaacttgttgagtttgtgttgtgttgtgttgtttttctgccaccaaattaggtgttcctattgtgtgggaggtgaaaaagagagcacaaatctattaataagtaaagcaactgaaacaaagggaaaaatgaatccccattttgcttttttgcaacattacatccagttaataaaagaggcttacaaatccaacagagatctgcttgcaggaactaactaggaagaagaagaagaagaagaagaagaagaagaagaagaagaagaaaaaaaaaatccaacagagaaatttgatcactgatttaaattgtgtttgcagtgcctaaagcaagatgaacgattcattcactgtaagtcagaaggtgacagtaccaggtgtaccatttgctatatggcaaatctacagctgctctagaaagtgaaatagcagtgcctgttcttatcccttagttgactacctcatcactggaagtgctgtaagagcttcagaagggtggaaaactagtaaaaaatgtccaattgtgcatcaaaatttatgcttattaattctgaaataagcattatagtctaaacatcataaaattctttttgcttggtagctgcataaaagttggttttgaaacagcaaaacctgattttcctattatgtggcaattctccttcctgaagctggtcacaatatttgctttattgctggcttcctctaaatatgattacatactcacccacacacacactgccactggctggactgcaaagcctagtgaagcagaacatttacctcacatctttacccaagagcattggttaaattgttcttcatgaagtcagataagcaaaagaaatatcccagggttcttcgtacaattagcattcattctcagtgtttaccttttcatatgtaatattctaatttagaaaaacactcactagacacttgtcaaataactgcacatatcttcatactaatgccttgctgatatatatgcacctgagggtaatgctggcaaataagcatttcctaaaatttatgtaatcatttgaaattcagaaaggattgattagcattcaagagatgccactgttcaatatttacaccatagagatttggcagaagcaaataatggcatataaagttgatgcttgtcttaattaaatgcagtataataggtgttgtggattttttttttcttccagtgagcaaagcagtttagcaatgaccagatgtaattcattttggagttctaagtttgaacttaatcaatatgaacttacagccatggaagaagtgattatcatttgttatttgctggcacaagaatataattgcctaaatagcatttatttaagcatatttctgaataccttatgcctaaaaatatttgtcatattttagctgttaatgcttatcttgtcattttgctaactactgctatttagtgagatgatttttcagagacatattggccaggcaagctaggaataaccagcaagaaaaatcaagtgagaatgccatgtgctcttggttgatgtttctcgctgctttagctgtgtcaaccactctgttcaaatctcagaatagagtggctgtcttagtaccagctcagaagagcgtagttggttaacgtggttagcccagatgctgcactctagtggactctggacaccccagggcctcaggtctgttctacaatggaccaaatcagtgactcacatctgagtcttgcattagatcttctttctagtttactgataaaaatctgataagtcttatcttgagttgtggctgtgtttggttaagaaggttaaatttcaaacagaccaatccaaagccaggagagaagaacaaatagaagtacaaggcctctcatcagtattgaaacattaaatcacacaaaatatattgagtggccactatgcagaaccattgtactaggcaagctatgaaatgacaacatagagtcttttttttgtttgagatggagtctctctctctccagctggagtgcagtggtgcaattttggctcactgcaacctccgcctcctgggtttgagtgattctcctgcctcagccgcctgagtagttaggattacaagtgcctgctaccacccccggctaatttttgtatttttagtagagacgggatttcaccatgttggccaggctggtctcaaactcctgacctcaagtgatctgcccaccttggcctcccaaagtgctgggattacaggtgtgagccaatgtgcccggcaagaactggcaatatatagtctttccaaagagaaggaaactcctgtgatacagagctgcattttggatccccaggacactgttctgaataaggcgtggtacaccaagcgaagagtccaaaacatgccatgccatcagcaatgctgcatgcatctcttgtctttctttctgttccttgttttcactgaactaatgcacgttccacacacatgctattctccttgattacattttattaatcagaaagcctttgtcaacccccatgttacataaatctcacagcaatcagaggcttcatgcctcttcagtttcccaactcctctgaaaggagatgatttttcagagacatattggccaggcaaactaggaataaccagcaagaaaaatcaagtaagaatgccatgtgctcttggttgatgtttcttgctgctttagctgtgtcaaccactctgttcaactcctctgaaaggagttgggaaactgcatgggatcacctccaggagccttagcaaggggcactgtccctaacacccacatcccaagttacccagattttggacagcaccaatgtggcctcagccctggaggaactgagtcccagaacatcagcatggaagagaacctatgctgttgctgaatacaaacacgtcttatttctgagtaagaaaatttaagctaatggaggttaagtgacttgtacacagtcatgtagagtcaggatttgaactgaaatttttgaactccacacgcaggaaaagagcacagatatggatttctatattacagaaatagtgcttttgcatttgtttcaaaattagacttactatttcttggccatccttttcaactaaatctaaaattttcattgtgaagtgtaaaagtgatttcccagaaacgtggggaatgtacattgccttttgctgccttaggactcagctgtgcatgctgcatgctgggtaccctgaactttggagggcagaatctctcctacagtcactcacactttgactctctccactttactctgggtacatggagctctgtgccatccataaaggtcagtgtgtcctgagtggccatgctggactcaaattgggcaattctgcctaatccctcagcaggaatgatcatattcattttgtcctatcttggttatacagtcaagcgttatataatgatgttttggtcactgatggactatatatatatatatatatatacacacacatatatatatatacacatatatacacacatatatatatacacatatatatacacatatatatatatacacatatatacacacacacacacacgtatatatgtacatatatacattatatatatatggtcatatatatgatagaagactataatggaggtgaaaaattcctattgcctagtatttaccctactatatactttgaagttattttagagcatattctttatacctatgtatataaaagaaaacttactataaagtagcctcaggcaggtccctctgggggtatccagaagaaggtattgttataggagatgacagctctatgtgtgttattgcccctgaagaccttccaatgggacaagatatggaggtggaagacagtgatattgatgatcctgaccttgtataggcttagaggctaatgtgtgtgtttgtgtcttcatctttaacaaaaaaagtttaaaaagtagataaataaatttaaaaatagaaaaaagcttatcgaataagcatataaagaaaattttcatacagctgtacaatgtatttgtgttttaagctgtgttattacaaagagtcaaaaagcttaaagaaattgaaaagtttataaagtaacaaaggtatagtaagctatggttaatttattactgaagaaagaaaaatattttttataaatttaatgtagcctatgtgtacactgtttataaagtctgcagtagtctacaggaatgtcctgtaccttcccactcactcaccactcactcactgactcacccagagcaacttccagtcctgcagtctccacctatgataagtgctccatacaggtgtgctattttttatctcatagactgtatttttactataccttgttttctatgattagatgcacaaatattcactgtgttacaactgccttcgatattcagtacagtgacacgctgtataggtttgtagcctaggagcaataggctttaccacatatcccgggtgtgtagtaagtttgtgtaagtacactctatgatgatcgcgcaacgaaatcacctatcagtgcacttctcagaatgtatccttgtcattaagcaacacatgactgtgtatataagaattgatagcacacctgaaataatcctttctctgtaccatttatcccaagagaaagtaattattatagtagtgttaatactgctaacatctatgtaggaatttttaagtgcagatttatttaatttttaatttttaaaattgtgataaaatctacatgagatttaccattttaacaatttttaagtatgcagtttagtggcattaagtccacacacattgcaactgttaccaccatttgtctctagaacttcctgtcttccaaaattaaaactgtgcttatgaaacagtaaattcccaattcacccactgctcagcccctgcagccgtcattctgttttctgtggagaacattttatttacaaagtaccctattcttataacattatcctttacacataacacaacattgaaagtttagtgattttataatacaaaatgtgactggactcagcatggctaacgtgctcatgaccacacagctaggcatctgagagagcccatgctccaagccagggccactgattccagatctgctgtcgtcactcacaggcaaggaagtcttttgacttggggcctgaaataataaagcatgaggccaggtgcagcggctcacgcctgtaatcccagcactttgggaggccgaggcaggtggatcacctgaggtcgcgagttcgagaccagcctagccaacatggtgaaaccccgtctctactaaaaatacaaaaattagccgggtgtggtggcatgtgcctgtaatcccaactacccgggaggctgagacaggagaatcgcttgaacctgggaggtggaggttgcggcaagccaagattgcgcccctgctctccagcctgggcaacagagcaaaacttcatctccaaaaaaaaaaaaagaagaagaagaagaagaagaatgcatgaatgaggaaaaagagaggcgttcatgacaagtttcttactattgaggtgatatggcctaatggtgatgactgcaaacttgaattcagattcttgttctattgtatccttaggaacgtgtatcacctcacttttttccatctgtaaacttgaaataataatgatctacctgaagcatgattgtgatggttacatgcaataattattaggaagaacttaccataatggctggcacatagtattaataagtgattattactcaaaacatctgtgaaagtcatagaaatgaaggctgcttatcgggaaatgcctcttctcagatacaatctttggtttacagattctgtgaaaaagatctttctcacgtcagcaataactgatacattaattcagtaccaagccatagtttgaaatctttgatctactaaccaaaggcatcattattatccttgatgttttggaatatgtcagagtaagcagactcaagccgcttcactttaattcatctatcataaatcccaaaatcaagccaaggtctaataataaacaattaggcctcttcctaggttggtgcaggccctagatgatgagaaagtggaatggctaggctcacacctgccctctgggaatgcctatgctaggaagctcttcacttttttctttcttttttttttttggagatggaatctcactctgtcacccaggctggagtgcagtggtgcaatctctgctcaccgcaacctccgcttcctgggttcgggcgatttgaacacacacaagaaagagcacagataaggatttcacttaacatcatgcctggaataaagttcatattaaaaaacaatactcagtatgttcgattataatagctacatcttattgtcctgtatgagcagagtacattatacctgttgtttctaatcttcataagcaagccttcgatgaaagtatcatttgccattcctgttttactgtctttccctaagatcagagaagtcaaacaactatacaaaattgctgagctagtaagtaatagaactgggatttgcacactttagtcatcaaagtctaggttttctccactattcactgctacttttctggttcattgattaagtatgtagatcagaaggcactataccagtgcttgtcatttatgatgaagctaacccattctaaatctgatccttctagatcctacttgaaagtacaagggctgagtaacaatcctgccttcttaaatgcttaataattccccctcatcaacatgccatggtttcagtcagagctgctttctattgatcggtttcaagaagtatcacagcttttatcaccacggtcagaagcactgctgaaattatagggtatttaatcccttatgctggcctacttactctaagcagattttcttttctttatcttttttttgagacagagcctcactctgttacccaggctggaatgcagtggtgtgatcctggctcactgcagcctcaacctccctggttcaagcagtccgccagcctcagccacccaaagtgctgggattacaggcatgagccactgtgcctggccagattttattttatttatttatttatttatttttgagacagagtcttgctctgttacctaggctggagtgtagtagcacaatctcggctctctgcaacctctgtctcccaggttcaagcagttctcctgcctcagcctcccgaatagctgatattacaggtgcacaccaccacacctggctaattttttttttttttttttttatgtttttggtagagacgaggtttcaccatgttggccaagctggtttcgaactcctgacctgaagtgatctgcccaccttggcctcccaaagtgctgggattacaggcgtgagccaccacacctggcccagattttacttttaatatgaagaaacatctgctgtctaaattcctatcctcttacaaatatttactgtgaacagaatttgataattgattgaaaatcattaccagattattagcctagattattagcagattctccctttcctaatattgccagcatcaaactcaatggagtgaaagaagaaggaatgaagattaaaacatgaatttgtgtacgtttttaagtattttaagaataccaaaataaaagtgtcatatgaatttcttagtatgtttctgatatagacaggatagagtttagtaattagcaatttcttctaattttttttaaaaaaagtttattgttgttacttgctacaagaaattatgggacaaattggataaccacatgtgctggcatttgtccaggacagcccatatcaaaagggattggggtccatgatactgtaacagtatcatttctaattataacttcaaggaaattcctctctcaaagaggtagctaagaaacttattcttgtcttacaaaagaatagggtttttaggatttaaaaacaggttgatgtgccatttttcctccaacttatgtattttagattctattttgattttcactgatccatggtatttcgttatataatgtaccccacagtttattgattcattctccgattggtggatatttattacaaacaatgttaaaagaacatttttctccatgtcttcctgtaatatattgttggacaatcactctattgttggacaattacttgcaactctagaaactgtcaaagtgttctccaaagtagctgtaccaaattacatttctaggcgtagtaaatgagagcttctatttttccatgtcatcaccagcactataatacagatgctgtcattattctgttttaatttgtatttctgattaccagtgatattgaacatctttctgtttctttgaagtacctgtttatcaatgtttttccatataatttttgctttttaaattttcttaagaaatccttcccaaccttggaggtcttaaagtacattctcctttaatttttttccaagtgtattaaggccttgcttttcttaatatgaatctttaatgtccagaatttaattttgtgtatggtgtgagggggagatctagtttttattttatttttcttaagggtagtcagtttttcccacactgcttactgaatcgcttgtctttcccactgtttttaatgccacctctcttatgtattcaagatctgtatatgtgtgggtctctttctggactttctactttgttcctttggcctatttgattatctcagtgctaatctcacatgttttatgcatttttataataaatcttaatatctgcttgagtagtccctccaccttttatttcaaaatagtcttaattagtcttaggcttttgcttttccacatgaattttaggtttggcttgctgttgttccacaaagaacccagtggggtcttgagtaaaattgcattgtatttagagattaatttggagaaaaattattttcttgggagtattgagactttcccgttcatgaacatagttcatctttcctttagtcaggtgtactctgatgtccttcaataaagtcatacaattttctccacagaggtattgtacatcatttgttactaatttattctagctattatatagagttggtttttataatgcaaaccttttctgtagttaatatccatgtggctggatatttttatattgcatttttatttaacaaatctactaaatgcccttattatttgaaatggcttttctgtaatttatcttcaaccttctgtgtagacattcatagtctgaaaataaatacagatttatcttttgcttttctggattccatttctgatcttattttgttggttagacaatattgacttggtgtgataacaggtactcttgtcttatttcagtcttttataggaatcattctaaagtcaaatgacttgatatgaaaagtgttgtctattttagtagtcttctttttagtagaaaaaagagaagaagctattgatcttggagagagatccaacagctattttttctttgccttttatttcaacaaattattctcttatcttttgttattttattgttctggttctagcttcttcagttgacgattttattcatctaattttcagccatacattttcattgttcttttgttttgttttgttttgtttctcatttgatgaaagcatttagtattagaaagttgcctcttggcacagccatagttgtatttgtggaagttttgatattggagacagacattcaaggctgctgtgggtttatgcaagtcactgtacagaactctagggggcaccactcacactatagtatatatcaatgcatccctaagagttgtgtggtacacaacaccagtagccctgtctggtagccctacgtccagtgctaaatattttgtcatctcgattgtaatcgagatttatttcacaatgggttttaaaatttccaaacaaatggaggttttgattatctttttatttttggattataagatgatttcactatgaggttatgcatattactgaaactttcttttgatgtgatatttagttaattttaataaatatggcatatatgacacagtctcaattttagatgtcagtatttatttctttatatcattattgataaatttgttatatcttctgtgtagattatttcttttattattatcgtgtgcttcttattttctttctttcttttctttttatagagacaaggtctcactatgttgcccaggctggtctcaaactcctgagctcaagtgatcctctcgcctcagcctcccaaagtgctgggatcacaggcgagcaccaccacacctcgccacttattttcttttaatgttttgatcttttaaatctgctttgtctgatattaagaatgttttatcagctttttaaaattaagattgacatcttttttcccattctccttgttttctcctgttcagttgatttagtggagtttcttgtgtttctgtgatttaggtggttttcctgtaagcagcagatgtctatattttatttggcttttctttaatctagcctacaatccctttaaacttttaaatttgagatcattttaaatctacaggaagttggatgttaagatacatataggggagtcccaagtacccttcatccaatttctccaatggcaacatctcacataactatcctcaatctaaaaatcagaaaggcagggcgcagtggctaacgcctataatcccagcactttgggaggccaaggtgcatggatcacctgaggtcaggagtttgagaccagcctgaccaacatgcagaaacccagtctttactaaaaatacaaaaattagccgggcatggtggcacatgcctataatcccagctacttggaaggctgaggcaggagaattgcttgaacctgggaggtggaggttgcagtgagctgaggtcatgccattgcactccagcctgggcaacaagagataactccatctctaaacaaacaaacaaacaaacaaaaccaggaaaatggcattggtatagtctgtagactttaccaattattcagtttgcatatttcaccagtttaaatgcactcgtttgtgtgtttgtatgtgttggggggtgggttctggcaatgttatcacatgtaggttcatgttactaccaacataatcatgatacagaactttttcatcaccacaagtttcctttgcgctagcccttttatagcacccacccctccctccattcttaacacctgacaatcactaatctcttctccatctctgtaattttgatatttcaagaatgttatataagtatatagtatgtaaccttttggaattggcatctttcactcagcaatattcccctaagattcatccataagtgtatcaatagtttgttcatttttatgattgtgtagtgttctttggtatggatataccacagtttgcttaacccttcacttattgaaagacatttgagttgtatacattcagttttggggtactacaaataagctgctatgaatatcatgtatgggtttttatgtaaatataagttttcatttctcttggataaatgcccaagaatgcacttgttgggtcatatgggaaacataggtctataatctattttttaagaggtgagtttgatctatttactaataaaccatcctagtttttgtatgtaggaaatgttttaaatttggccacttcttggaagatagtttaggtgaatataaaacttgaagttgacaatatagtctcttaacacttgggaagtcttttggaagtctactgtcttttctttttgataatttttaaggtttttctttattgccagtgtcttatatacttttactacaaggtgtctgagtataccggaagtgcacatccaattagagggcactgaagaattctgctattctcttttcatatgtcacttctatgcaaatccctctgctaactcctatcaggcatatgttggagcctcacagtctactgtgtcttctagtttttaagcttttttcccccttttatctcactgtgctgctttttgcataattccctcttcaactatatccagtctagcacatataccatcaacttagtgttttgaataattgttttttgttttaaagacttctttttttttttttttttttttttttttttaagatggagccttgctctgttgcccaggctagagtgcagtgacacgatctcagctcactgcgacctctgcctcccgggttcaagtgattctcctgcctcagcctcctgagtagctgatattacaggtgcctgccaccacgcccggctaatttttgtatttttatagagatggggtttcccatcttggccaggttggtctcgaactcctgacctcgtgatctacccgcctcggcctcccaaagtgctgggattataggcgtgagccactgcgcccagcctaaagacttcttttttttaaaaaaaaattattattatcattattatctttagagacagggtctcactctgtcacccagcctagaatgctatggcatgatcatggctcactgcagcctcaaacttctgggctcaagcaatcctcccacttctgcctcccacatagctgggactgcaagtgcatgccaccatgtctgtcttgctttaaagatttctaatagacctgttttcccattaatgtttaaatttggcttctattgtttcattacgtatcttttaaattttttcattttttcctttttaattaatcaatttatttattaagatttttttcttcttgccttgtcttatggcactgatatctttctttttagatgaataatatctctatttctctcttaaacacctcaagcaaactgattttgaggtttttgtcagattcttccatagaaataatttcttctggagtgagttgatgttttatttttgctgactttttccttagcaatatatatcttgctgtatatgctgtatgtaaaaagtgtgtgtgtatgtgtgtgtgtgtgtggtttttcacattattagttgcagacttactttgagtaagacttttggtggctgctcttgtttccgtctctttctcctgtcttgtgttttctttgctacacacactgtgctcactcctctgcatttagcatttctgtattagcttctgtctgactctatgagatcctgagtccagaggcaagtcctatatggtgtttaggcttctgcactgtggtcatactgaagatactttagatccagtcacagaggcagtgggggccctgctttaactcccagtccggggatatatttttgccctgctaccttgcctagttccacagcttaccaaatctatagcttgggcagtaaattaggattagttttgttttttttttcccccttctttcattccttctaatagcctccttttacaaaaggagtggaagtttggaactcctgccccagccctgcgccatgctttactttaagcaagacctagctctggttgccacatgcatggttgccacactttaggccccaacacccttcagaagctggactccagctactgttcactggactccagctattgttcataattttttttttttttttttttttgagatggagtctcactctgttgcccaggctggagtgcagtggtgcgatctcggctcctgcaacctccgcctcccgagttcaagcgattctcctgtctcagcctcccgagtagctgggattacaggcgcgcgccaccaggcccagctaatttttttatttttagtagagacagttttcaccatgttggtcaggctggtctcaaactcctgacctcatgttccacccaccttggcctcccaaagtgctgggattacaggcatgagccaccatgcccggctactgttcaccgtttaaatcctggccactgctctgcatttctgctctgtttgtgacagagatgttgacattgtttgagcctagctatgtccttttctctccctttgtatttttctgtcattgatatgtttgtaacaggaagagtgcaccaaaatgagaattcaccacaatattttgacaagaagcacagcataactcttctgtttccaaagagcctgaaatgtttgaatcctcccatcaccaccaaccaccaccgccaccatcatcccagcactgtttctctctctctctctctctcacacacacacacacacacacacacacacacacacacagaacaacactcaaggccaggatctcctaaagccttgtgccgtgggtctccggtctgcctttccaagtttgtgtctcaccattctccttgcccatgtcagcacactgttgcccaacaaactgagcaatttgatcttcctggagcctattctatatcttactactttggggctagtttgtgttctgcctctcttcttgaaatgccattcaaaacaacccccagtctttcaagctcagacaaactcttcctctatggaaagacctatcaaatctgccatttgggaaagaatttccctcttctattaacccattacattgtttccaatttttattacatttgccatgatcaaaataccattttaaaacatcttacccagtctcaaacacttaacatagtcttatactgaagatgttaactgtttattaagaaactcttgtgtactagatgctgtccaaggcctttttagatacatcgttatctcatttaattccttcaccaattacggtatgaggtgaaatttgctcattttacagataaggaaattgagcgtgagtaagtcttacccaggtccttatgaaactagcagattcctaagacctctctgagacctactaaataggaattgctaaggatggggcccaggaatctgcattttaaccacctctttatatgatgctctagcactcctactgtttaaacctcgttgctcatcagaatcatctgggggttgagggaggtggcttaaaaatattcagaactgggcgggcgcagtggctcacacctgtaatcccagcactttgggaggctgaggcaggcggatcacaaggtcaggagttcaagaccagcctgaccaatatggtgaaaccccatctctactaaaaatacaaaaattagccaggcgtggtgtcacgtgtctgtagtcccagctactcaggaggctgaggcaggagaatcgcctgaacccgggaggcggaggttgcagtgagctgagactgagacactgcactccagcctaggtgacagagcaggactgtctcaaaaaaaaattttttttagaactaccaaattggaatttccagagtaatggcaattttttttttaccagtttctcagatgagtatgaagcaggtggttcaccaattcctgtgtgaaatatacctaggcaaatgtcagaaactggtaggccattgatagaatttgtgtgtgtgtgtgtgtgtgtgtgtgtgtgtgtgtgtgtgtgtgtgttataaaggtgactcaacatttaaaatcaagagaatccacataaaatatgaattccagtttctttctaaaaaattagaaggtcgggttacactaggttcttatgttgcaggtttgtttgattattttttaaaggcagggtcttgctctgttgtccaggctggagtgcagtggcaatggccatagctcactgcagccttgaacccctgagctcaggcaatcagcctcagcctcctgagtagctgggactacaggtgcatgccaccacacctataggctatcatgttgcaggtttctaggtgccttgatactttgatgtccctaataatgaaagtaactgcaagaagggcagtcagtttatgcctgaacataaggaaaaattcatatattaggagaacactgtacacagatataagtacaccagataaatgaatataagctttactaaagattcattaccaaatacaattttactcttcaaaaattttacttatcaaaaatttattgaagatacctcataatctcttccctttaataaaaattaaaatgtaaatgaaataaaattataggattcctaaatattaaagactactaagtacaagaaacaagattagtaaatattaacaaggttactaaatatcaaccatgagattcttgagtttctaatttgccattcacttgcagaagttcacctgtgagttttgcattggtagataaagaaattcatctacctgctacaattggcctcagattctaggtgaatctgatctgtctacagcactccaaatataaagaagaaataatgatagtttcactttctgtaaccctactcagtggattctgttgctctacttgtttagctgtaactactgtcagaaattttctgtggaggccaacacaggatagtcggttttttaatgtgatacagttgtgattgtaacaggctgtataaatagccatcagtgggtaccatggaaaccacctggaattctttatctctgtcctagaaagtactggagcttttgtacagcaactgaagacatatttaagatctttccaagtaataaaaaaggtctttgtgcattttaaacattaaataaaattaaatcacaaataattattaaatagcaaattactaggttaggccctttctctagctctctgggaatcatggttttcagacctatggttctcaaactggggctggaagtcaaaattaatgaacaaattaccccaaatattcttagtactttcaaaaatttatttggaaattacacatttgtctgctataaagttgcaaaggctaaataagtttttactgattaaaaatttacataataatttacttatcaaaaaattacataatatgactcatattcccttgtaaggatacataaggatagagaacggaaaatgtatccttatgtatgtatccttatccttgtatccttttttttttttctggttccactttgtttttattcactgaaaccaataaaagagttgaacacagcaaaacttggaacaacaaggaattaactgggtggcagcaaagggcaccaaaagaaaagataaattgcccaaaataaataagggctggtgaggaaaataaaaaatgtttccgaaaaaagtgggctgtgatgcaaggtactgtgagataaagaagcaattgtttcacgcaaaaaatagaggggggcacctcgctgaagccagcgaggccgctgcaccacgtggtgtcaggagaccttagcaatggcccaggttcgctggctgcatctgctgtgccaggcgcctactgtgcgctcctctcctcatccagcaaagctcggcctacatggaggtttgctgactcccccaggccaccttagttcctctcggagtctgtatgggtctgggcgagatgcaggcagcttatctgtttatggggctgcctcctccagtacacggagagctctttgaggcaagggacaatttgatctgtttcttcatccttaaaatttctgctgcttttgctgtttctgtgatttccttggtttctccattggtgtgcttaaagcgatctcctctacacgaacgctagggcagagcacattttcgcacaggcagcgccgcagcttgccctggatcttgtcgattgagttgaagtcggacacgtggaagacatgggtggacttgggctccgaggcgatctcctccagctcctccctgagcgcctctcccacgtccacggtgaagacgcggatgccggcgcgaatgccggcacggatgccggcacggtgggcagccgccgtggcgtccagcaccaggtcctggctgcagccattggtgagcagtatggccacctgcttgtaggcgcagtccccggagcggtggccggcgcgcggggagaagctgcgggctgtgatgtggtgcagcgcttcgccggtgttggtgttgccctgtggtaggcgatgcatcgggcggccgccttgacctcctcccgcgagccgaaaacgcccagttcgaaggccacgttgggcaggtcgctggagcgcacggtccccatgcagtcggggcccgcctcgaaggtatccaccaggttgactacccactgctgcaccttctcaaagtcctccttgcccacgctggaggaggtgtccaagaggaagaccagattgtagtggacgcttctgcaacctgtccgttgggcctatcagccgccgccccgactccacagcggcagcatccaaaggaagccggccacagcattccctcggagggcagccatggctctcctgttcttggggacaggcttttcttggccatttaggccaagaaagacgcagttagggcctactgcagcatggcctagcagggaggcactcgggctgccagcaggagtccaatcctgggcccaggcccactggaagcagcagctgggagaagacaccagccccaggcagccccctcctgggggtcacctgccagcaactcgcccactctccccccaataatctcacaaactcagactctagacaagacttgcagtaagtctggaggctttccccaggccagggggccagagaggatacatacataaggatatgtaggggaaaattagtcaaaaataaagaagttaagtgaagcgcaaatttgagggaaaaaaacttttaaataaaaatctccctggtaaacttcaaattcactaaaatcatttctatgtggatgattttctcttttctttaatatattttagtagctaaataatctacacaaatgagatttaaaaattgaactccagacaaatggaaacgtgaaggatcctatgagcatttcctgtccttataagggtggaggttttttcttcttcatctttttgtctccaactcctagcccagtctttggcatgcggtacttttttttttttttttttttcctttgaaaccaagtctcgctctgtcaccacgctggagtgcagtggcacaatctcaacttaaaacaaccaacaactcttgggttcaaacaattctcctgcctcgacctcccgagtagctgggattacaggcacctgccaccatgcccaactaatttttgtatttttagtagagacagggtttcactatgttggccagactggtctcaaactcctgacctcaggtgatccatctgcctcggccccccaaaggctgggattacaggcatgagccacctcacccggccacacgcagtacacttttagacagagtctactttgcacttcttggtgctgtttactggcacacatattcaaaagagtgaccatggctgatgagtgtgggtcgcaataactgatgcgtggccaaaggtgtttcccacaacagttggctttgattcaccgtgtatcttctgcactggctaccgtgtagttatgccttgcccttcatgggtcctgggattacttgactgctgccgaggctaacagcctcttttttattctgattgtgacccattatattagtctgttggccactgactcactagtacttggaagcaacccacagctatgttgtcacatccacgtattcccctcaacacgcagcaaattggggtgagaccaaggaaaggcccatgcacaaaggaacctgacagctgtcagcagtagcacctgaggccaattgtaggcggtaatagcacacactcagaaaaccatacgccagcagtgtgtgtgcatcacaatgccgggagtgcacatattgtgggctcctcatcaacagggaactcatcctgcattgcttttatatcccaactgtacttagcacaagactaaccatacagtaggtatctgtgcctataatgatttcaccaatatttctacatatgaactactattcatcatttagggtctcactaaatgttgcttctttgaagatatttgcttgaatcccctatggcattttgtagttacctccatgcagtaatgataatatccaagtcattcgttccagagtttatatcacttatgtaaagcgtataactccaaagctttgcaataggtgttcaagcagcatataatggatggatggatggatggatggatggttggttggatggataaacattaattgcttagaagccaagtggagcaatttgaaggagcactctctcctatacttcttgttttgttatgtcaattcatgaaatccccagaatgacacataaaaggaaaccaaaatcaaattaaaacttatgaacctaaaccatcttgtgtcatccttggtagacatttagtggaggaaatatgaaattgtactattcattcaaggagttaataggtaaaccagtttatccatcactaacttgtttttatagcatcaacatggtgtaaagacaaaaacaatcttgaactctagtaactatcatctatatttaatgcctctatgctacaacagtaagactctggatgattatcagtaccacttagaattagagcttcttgttaaataattcatacatttgatggggaagagcttcaaacaatgctcaaagctccagtaattaatgggctaattacgagatgcttgtaaaatggcttaaacactgaaagttcagtgtaggtataattgttttagagttaaccctgtgtatttaaatgtcaaaaaaaatattcagtgaagatgagtagagggttgggagagagaagagagatcataagatatcacaccagtttagaagtcttcactattgatttaagatttctaaaaaggctctggaaaggcagaatgcaggccttcctaatgccccaggcattttccaaccatgtctctaatcacataagaagaacatcacccatgagtcataggactctgggtactcttagaggtcagaaaccgctgcagtgcaagtcctttcagcctaatcgcctcttcactagcaacgcccaggttccacaagagtgctctgtttcattccaggacccgtgggagttaagaattgaaggtagttgattttttggttggttcatttgtttgtttttcctccctgttgtttgctgttctcagaaatgacctgctctctgagctttcttggagtgtaaggcatttcaattctagaaaggtggggctgggaggaaaatggtctccttgactgcaaaccatctagctgaaatgtctttcactcatcccactggaagggggaaaaaaagccttctttagaagatgaaacattgtcttgtgtcttttagcatcgttctgggcagtcagtctgttaggacatattgggcgattataggactgtctttttagagaaagccatgggtttcaagttagcaggaaccatctatcaattcttaagattatgccatgatttactgtcagagcatcatgtattctgattttctgcctcccatgaaacattgtgctttccttttctattgatgtatcaactataatagttacaagcagctacagaaaaatcaatagcgagctttcattactgtgtacatcaagtaaagagccccccgctgcaagagcacaacttgttagatgctcaccatggaaggtgtacaacactcaactgtttttttcccagactgcattagaaaaatcaactatagaaaaattataaaatagtatcatattctacatggaagcacagagaccctataaaatctctcaaagggaatggacaggaggcattatcatgtttcaaaatgagcacagcatttccaaagtgaatataaaggtatttaatgcgattcctacgtggtttttgtttctggttttcttttgcatttgtcttcttaaggtcatcaggatagtgggaggaaatactgaattagtatttactagattgactgcgtaagcagaaagtcaccactggctgaagtgcatgctgcaatagtcatgcgctcaacacccagccaagcaatgaggaccctaagaactgtgtgaatacagagtaatattaccagggtcttaatcagatccaggagtcccagacatacatatgcaaagttttattctctttccaagcacatgttggaaaaagaaaaagacttaggattttaaagcaacaaatacctttatttgcctttgggagcacattagctaccaattagtgcatgtaaattgagactgctgaaaaagagaatgtatgaactgatagtctgggtgggggactctcaaggcctcagaagttctctagcatttcagcatcaatttgggcaacataaagagatttccaaagcaaatcctaacaagtcctgaatctgaaccatgtacaaatcataaatcccatggaattcccaatcttaacatgtgcaatgaatgtattcagatctatatatttaagtaattagttcattactttctgatagttatgatctacataaaggttttccatatgttactgttatgatccaagtccaaactccagttattttttatctttagagataatatatttagcaagaaggcaaaaacgtgcctgataatttttatgttcatataagaatgttaagaaactacaaaaatgtgttttgaaatattacagtaacaaacaggaaacaaactaaaaccttgagtaccaggttaacttccccaaaataccattttaaaatactgatgaatttgaacaagtggtttgatttttgggcatctgttttgttttaggggaagggaggaatatttaaatgataaaattttcaaatatcccatttttttcatagttttcccaacttttgtggattttttttctatttcgtttttctatgcacccaaaaattatgtgagaattttgcatttgcctttgacattctaacaacagaatgaactgccattcagctatggtcactacattgagagtttaatgctccaaaaggtatgctctgcaaggactgtgaaaagattaattagtctttgctggtttcatcagaggatgctgagaaactggcaacaggctctctcctgcaccacagcccaagaggaagatcctcttttccccagcaaaccaggtagcaatgacatctgcaaggttagcctttctatttgccagtgtccctgacaattaaaacagtgaaaataattcatgcattgccaatcttaattacactcttgctttcgtttattccttttgctactttcctggctggtgttttgcatgttacttatatgcagtagtacttatctaaagcctactttagagtagttgtccttacaagaaatggaagtctaagtagagtggaatagcatttggatgattacagattctctgtgaattcagctaacactttcctcaaggtagcactcatgctcctgttaaaagtacattctttccacatgcttttttcacatagttaaaaagaaatccttccatgacatactgaaccctaataccaaataagctggtgcttcccctgagccacataggagaatgttggctctgagaatgtcgcagcatccctgcactgctgtgatgtgcagtcaacagagggtacgagctctggcagaaaacccagaacaggatattatgcacagtaggggctttccaacccagctgttccaagccctatagggtcaaaatgatggggaaatccagaatgacagtaattatgccatcaaccttacggctccctgccagagaggttgctggttagacatctatacatctagtagctgtttaatacattttttaaaacaggtatagtgaaagaatgcattttaagcaggaattgaaaatgtactaagaatgagacaataatgtatgagcaagtacttactttgtttcttactttaggtaagaaaaaataaaaggaaggaggaaaggtatggagggggagatagagggatggagggaaaagaaaaggaaagagaagtagatagaaaatcaaacacagatgaaagcaaagacaattatgattataattatttcattccctaatcatgtaagatttgaattttctaattaagaaaaaagaacaaaattagttcatatgtcaaaaagaggattctaaaattgcactgacataaatgttattctgtgattcagttgcattcttaaattggtgtgttatttatgcaaattatggtaagaaaaataattttggatatttttgttttacaaatatatttttcactttcaccacattatttccagaagtatctttccttccacaggggttccctgtctgctcttgcttcctccagctcctcaatatatgtacctttcagggttgtttcagcagtcctgaagttgtgtgtgtgtgtaagcatgattaagagtacttttgtgggagtgtgctattgccagcctcacagatggtgttatttcctgtgttagacttcctacttactgatagctgggctcacacttgacatcctctcttaactgcctctagaccaaaacatgcaaagtcttgcagtgtgggagggaacctgtggctgtgcattgggttcagttgataacaataatcaccagccctgatgagtcaccagagagcaatggggtgatactcaagtaccagagagatggtggtggtctctggtggccccaccactgtccaccacttgcaagtagataaactggtcattaaaggagctgtggagagccagatgcagtggcacatgcctgtagccccagctactgcagaggctgaggcaggaggaacacacaaggccaagagtttgaatctgacctgggcaacatagtgagacccctatctttaaaaataaagaaataagtaaatttttaaaaagaaaggcattatgagagtttcagcagaacatttaggaagggtcttctagagataatgatggacaagtcagtaagctgcttgttcacacactaatgtccagttcatgttgactgctatctacccacgtcttctcttctggcacctgccttagtggctggaagctctctcagaagcttaaaaagatgcttttattttacctacccaacaaggtttctacgcattccagcctccaaggaggggtggttcccctttgtgaactgagatttaggaatatctatgtttacaactccgggactaagattcaataaagcttcaggagggtggaagtgcagcttgtgagggcaaaactttagaatccagtggacttcttaaggtcatctgaacagtgagagtaagtactaggctcttatcccacttccaccaccaaccaatgcagaagtgggattaagattgataatcctgagatagcattaaatgttttgatacaggcatgcaatccataataatcacatcagataaacagttgttctgtgcacacaatctaacatttatgcattttttctttaaaaaacctttctgcatccaaatggcacattcattaagtttaaaatgaagcacaaaagatagagataaaatgaagcaactctataattatataaattataaatcttactgtaataattatacagtagacttggagaaagacaggcctttcaagaattggtttttagagatgtgtctaatgccttaaagaagtgtttgctttaaaatcttgaaaaagcctcatgtagaagtgagatgttgtaaagtcatcattggctttggccactgccaggtcgactaccagtttgctatttgtgatgtatttcactattttggaacttacaaagctattcctgatttccttctgttaatggaggattaatgacaatgctgaatccacagataataataaaaaaattttttttttttttggacagtctcactctgtcacccaggctggagtgcaatggtgcgatcttggctcactgcaacctccaccttttgggttcaagcgattctcctgcctcagcctcccaagtagctgggattgcaggtgccagccaccatgcccagctaatttttgtatttttagtagagacggggttccgccatgttggccaggctggtctcgaactcctgacctcaagtgatccacccgcttagtctccccaagtgctgggattacagaggtgagccaccgcgcctggcccaaaaatcaaattttcaacagttacttaaatccactacttcccaagatgaaagctttattaccaactgaaacttagagaactatgagtggtcgtgggctgcctctgaacttgctgtgggtatatttactgagccaccatgggggtcatgtgaagagtctagggttttgttttacatccttaacacttcagttttgaaaatccctataagacagtaatagttctatagggtaaactccaaagagggcttctgtagggggcataggagtggcacccacagttgtgggaacgtcagcaaacctgcatcctccctcaggggagaggtcagagcaactcagaatattatgactactgaaacaactttttgacttcacgatgctgcaaagcaatccacatccagtagaaaccatacttcaagtacccatacaaccattctggtttttctgagacggagtctcactctgtcacccaggctggagtgcagtggcgtgatctctgctcactgcaacttctgcctcccgggttcaagcaattctcctgcctcagcctcccaagtagctgggattacaggtgcccccccaccacacccggctaatttttgtatttttagtagagagggtgtttcaccatcttgaccaggctggtcttgaactcctgacctcgtgatccacccgcctcggcctcccaaagtgctgggattacaggtgtgagccaccgcacctggcccattctgttttttagtttcagtacagtattcaataaattacatgagatactcaacactttattataaaataagtttttggttagatgattttgtccaactgtgggctaatgtaagtattctgagcacatttaaggcaggctaggctaagctatgatgttcagaaggttaggtgtagtaaatgaatttgtgataatattttcaacttacgatgggcttattgagacataaccccatcgtaagttggagcatctatattgccgacatcttaacagagccgctctctgtatatgctgactgatacattaggcttgggataaatcatatctgacctttccttataatagcactgggtggacttcaaaggtggaagagatatttcttgttcaattaagtcatcattgcagaaagatgaaacagatgatactttataagccaggcactgtcctaccttgtggtaattcctattaaaacacatttaaaagattaggaaactgaaacttagagcaatttactaatttcaatgtcttatggccagtgcagtgttcacggatttaaaatcacttcaatgcaagtatcaataattctgctaaataatcaggagttgactataattaatctgcaaaaaccaaacaattttccccacttgaattaatgatttctgggtgtgaaagggaatggtcaccacatagtcttagtttccttccatgcaaaccttagaattgagcatagcacttacgaaaccaatatgatcagataataagatatcttactattatcactgtcttagcaaaatctgtcattacactgaaaaaaaaataggatagcttcttttgcaaatgtttcaagctccaaaagttcttagaataatctttcttgttattttctctgccacatggttacacaaatacaaaacaaattggaaatatggattttctgtctttcatatacaaatacatatccctgagcaattgaatgaattattaatttgttttgtccaaaaatggataagtatttggctttaatgatcttgttaggcaactagtttcccttcccttatagttctcaactccagagaccctctcttttcatttttcaagcaaataattcagaatcagtgttgatccactgcatgatttttcccccttcatttcaacctctgatcttactgagcagaattttaatagctaagggaaatgatgtaataataagtaacaagtatatctagctcttaaagagtagctttaatttaactctacaaactcataaaatattggatatttagaatgaatgtagatagtaacagttctcatatgggcataaaattgcaagaattttactgattgtgatgtattacttttagcacaaatagaatgtaccaagtacaataaacttcactaattcaggacatttcaacttggcaacaaaaagctcaatttatatgtacttaaagaaatgcaattttagtaacctcagtctaatgcttaattaaagtaacatgttaacacagtggggcacaattaaaaaggagttgggagcatcagctataatattcaaatacctagtttttttccaatccaattaatctattttgtgtgtctgtctcagaaaggatagtaccagacctgccaaaggtgttggcgggagtgagataaagtagatgcaaggggtttaataaaaattcaaagaatgacataaatataaagtattattctcagagattacaattcacaattagcctgcattttataaaatacctctaaaacatcttcaacatttaaaaattggatgttaaaattggtgatacattaataatactcttcattccttgaatttctgattctgttgctgactttagatagaatttatttttcatcagttacatactcaaaggctaaaacaggaaggcattcttttttgagacaaagtctcactatgtcacccaggctggagtgcagtggcgtgatctcagctctctgcaacctccacagaaaggcattctttaaacttcttatccaaaataaacccaaatacaatttccgaagtagcatagagttcaagttgctgagtcttacctagtgaaccatcagccaacactgtagaacatcatggtgctgccatatagtgtatttcttgctgttaggaaagcaaaattccctatcctattctgcattctggtattgacctgaccttaatatgtttgattctttttttttttttcctaatagggacagggtctctgtcacccaggctagaatggcccgatcacagttcattgcaacctcaaactcctgggcttaagcaatccccccgcctcagactcctgagaagctgcatgccaccacacccagctatttttttttttaatttttaaattttttgtcaaaatgggatctcactatatcagactggtctccaactcctggcctgaagcaatcctcctgcctcagcttcccaaagtgctaggattacgggtgtgagccacttactgtgtctggccatgtatttgattcttttaaaatcatgaatacttgttctttcaaacaacaaatatattatagtcatatcttggtttccaatttctgtttaaattaacaagatgagaattgaggcccagggaatcagaggttctccagatgtttcccttcattcacatctaatcctacccctccacaggaggtatgaaaccaactcattgcaaagatgtcacccagggccacatcacccagggatactggggttgggcgagagcataacgggacagtagagacctcacctaactttgccttcgtgcttgagcactaaggtcaagcaaacgttttatgaagtttcctgcccagtcaactgctgagtaatatacattataccaaataaactggttattttgtagagattgttgaatgctttcgttcaacattttcattttgaaaagattttttaaattatttattattattattattattattatttttgagacagagtctcgctctgtcctctaggctggagtgcaatggtgccatctcggctcactgcaacctccacctcccaggtttaagtgattctcatgccctagccttccaagtagctggaattacaggcgcgagccaccagcacccggctaatttttgtatttttagtaaagacggggtttcaccatgttgcccaagctggtctcgaactcctgacctcaggtaatcctcccgcctcagcctcccaaagtgctgggattagaggcataagccaccatgcctggtctgagaagatttttttaagagtgttctgctgctctttagtttcatgtaaacttattttccccatggcaccctcctcactgtcatccatgtcccttttctgcgtgagctggtatcgcttgctaccctctaagacctaggggatagaaaacaatgggctctagcctgccttctgcagggagcaaagcctagaaacaggaagctgctacaagcaatcccaactgcactgtgtccatggagtatcatgaatagtttacacgaagaggatttctttaaaatgctgaattatgaaggagtattgattgtgtgagtagaaatatctagaagactacatcttttgtcttctagtctaatgctctgacatggagaagtgtttccagtcaacggtttattctgaagatagcaccttgtccactaaatgcacattacattctcaaatttacctttttaaagattctctttgaaataatctctccaaaagtcagtaagaaacatgtcgagcactaccaaagctgagaaagtggagctgaatcgggctcttagcctcactcacacaaaataatattttaattggctaagctaatatttgatccaagttcataaaagtttgaaatcaaataattaaatgcaaatacagtcttcatcccaaagacgataagaatgcctttaagctaatatttttaacaagaactgttccacagcgctctcttgtaaattttatcatacctgaggcagttttcctcattcgattagctggaaagctgaatttatcccgaggcaaaccagacatctagtatgggctaaattcaacaactggagcttaaatttggcttaatatatccccacttggatctgcctgtttaattctctttcatatgataacgttggtttattcatagtcttgacttgccacctgaacaaactgaacctcatatcttattctaagagaataaaactttgcaaaaaccaccaaagtttctgaatggaaatcaaatacaaagtgatgctcaaaaactgtttcaggacgtgagtacaaaaaaaaaaaaatagtgaagaggttttctctgagggagggctgctctttacgaatgtggatgtttcctatgctttgggagcagatggtctttagcaggataaggactaagacctccaagaccagccaaggcagctgcaattgtgtctcaagcttgaaattctgcatgctacctattttatcaaacaccgtatgtatttggccttattgttaaatctattttaaatacaactttatttgaggtttaggggcaaactaggaaattgcttcatcctatatccctttaaattctgtttcctggctcagaatatcccatcgatttccagccagaggccttatttttctttgattttccgtatattttaatgtagttttcactatcatctgatatgcagaagttgatacaatgtacgatctgtttcataaacccctttagtatagcattctgtcctcatttttatccctaagaattctagaatgcaaattgcaaatgtgtatacagagggaaaatggaagtgttctatgcccgtgatgtggtccctaacacagctcacagccccaaaatacaggcttcctgaaaatactcagattaccacttcacaacatcaaacatatcaaatggttttccttctactcattgagctcaattacttcaattttgaatcaaattacactttttctagagacacattataggaaaagagctttgttatatttgaaattggttaggaatttaacaaggtgaggaactttaaaattgcttaagagtctaatagctgggggtattgatacatagaaagtgctcaatatatttttattgaattaatttgcatatgctttgtattcatgggcactgaatacaaattagccaattcaataataaatgcattggttgtcttttatgtgtgtggtgctatacctgtgtggtgtaggaaataagaaacataagtcagaatctctgccttctgagagaatgcaatctagcaggagaggcaaggcataaaccagtaaccggagaatccagaaaagcttgcctgggaagatgcaattgcaaatatgtggaagatgttccacagacaagcaagcaagaagactggcgtgtgaaacaaaacggattctcttattcgacaaatgtgaactgagctcctcctttgtccagacattatgctaggcctgggaaaggttataattaacaagagagacatatccctgtcctcataattgacagtgaaattaccatgtaatacccaatgccctgcatgatgggcaaatagagtgtgctgtagactcacagcagagaggacttcaaggaggcttcctggacgtaatgatatctgcgctgaggcccaggagattggtcaaaattatccaaataaaggttaggggaagaaagttccaggtactggccaggcacattcaagaaactgaaagaagttggtgggtggggtgaaataaaacgggatagataaacaggccagataaatgtgtttaatctttaacccagggtagtggggtgccattgaatgattttaagcagagggaactagaggacataattggattcacatttaaagttatcactcatgctgttgtgaggaaaatgcatttggaggcggggacaatattggaggaatcagttataaggaacagaggcgagttacggttgcagcaatggagaataaaggacagattcaagacgcaattagaaagcagaggcagcaactcggtgatggctggattggaaaagaagaggagagggaggagtcatgaatgaatctgggtctcaggcttgaaatcccaggtagatattgggtaacgggatggattcttagtccaatcattggtataagaaaagcaggagaaggagcaggtttagaaagccagacagattgagctacattttagacactgagtttgagatgtcccctggctatcaggtagagacatctagtaaatagtaaacagtcatatgtacagaaccaaataaagttatatgctgcagtcttccacatgggtcactgagtgagctggtgaaagcattgaacacactgaaataaaatgttcaacacatggaaaagtccaaaggatttgagaaaaacaagcaggcttggcactacaagccaaagcacccagccaaaaagtcctctttgaatccatttcccaagaaagtacaatctataatggagtttgtgcttttcacttgctgttataaaacaattctacacaaaataaaaataaagttggccatgaatttgatatggaagaatagcagcatgtcaaaggcaaaaaaaaaaaaaaagaagaagaaagaaaagaaaaaaagaaaaatgttggtttagggcaagaatttaaacaaaaaagcttattctcatatttcctgaggatctcctctgtgctgagcactggccaggcactaggaatacagctgcacataagaccaagtctctgcctacacggctttcattctagcattctagtgggggtgacgggcaattttgtttattgtttttttttttttgagacaagatctcactctgtttcccaggctggagtgcagtggcactatcttgcttcactgcagccccaacttcctgggatcaagtgattctcccacctcagcctcccaagtagctgagactataggcgcagaccatcacactcactaatttttgtatttttgtagagacagggtttctccatgttggccaggctggtcttgaactcctggggtcaagagatcctccagccttggcctgccaaagtgctgggattacaagcgtgagccactgcacccagcttggcagtttttaaaattagacaaatgtatgcataatgtaaggtcagtcatgaacaagcaataataagaacacatcatttagggatataagaaaacaggtgatattgtttggatccttgtccctgcccaaatctcatgtcgaactgtaatccccaatgctggaggtggggcctggtaggatgtctttggatcatggggtcatgatccaaaacaccaggtccctcagggcctggtgttgtcttggtgatagtgagttcttgccagatctggtaatttagaaatgtgtatcacctccctacacatactctctctctctggctcctgccttcaccatgtgatgtgcctgccccaccctcacccgccaccatgattttaatcttcttgagacctccccagaagctgagcagatgccaacaccatgcttcctgtaaagcctgcaggttcatgagccaattaaacctcttttctttataaattacccagtcttaggtatttctttatagcagtgcaagaacggcctagtggaaatacagaattctggattatgatcacctctggggcatcaggaattcgttcttgggaggaacacacagatagcctgaagggctctgaccatgttctggtcttcctgatgagtggtggattcataggtattcactatactatgtttaaaaactgacatatacattacatttaaaacattaattatagtaaaatatgcacaatgtaaaatttaccatcttaaccacttttccatagattttaatagacttttttttttttttttgagacagagtcttgctctgttgtccaggcttgagtgcagtggcatgatctcagctcactgcaacctccacctcgtgggttcaagtgattctcctgtctcagcctcctgagtagctgggattacaggtgccagccaccacacccggctaatttttgtatttttagaagagatggagtttctacatgttggccaggctggtcttaaactcctgacctcaagtgatccacccgccttggcctctcaaagtgctaggattacaggcatgagtcaccgcacctggccaactttattttttagagcagtttttttttttttttttttttttttttagacggagtcttactcttgtcacccaggctggagtgcaatggcacaatctcagctcactgcaacctccaactcccggattcaagtgattctcctgcctcagcctcccgagtagctgggattacaggcatgcaccaccacacccagctaatttttatatttttagtagagacagggtttcaccatgttgaccaggctggtctcaaactcctgacctcaggtgatctgcccgcctcggcctcccaaagtgctgggattacaggcgtgaaccaccgtgcccagccctggagtagttttaagttcaccacaaaattgagcaaaaggtacagagactccccacataacccctgccccgctactgtcagcattcccctaccagcacaagcctcccctactgtcagcattccacactggagtgaaacctttacaatgaatgccgctacattgacacatcctcatcacccaaagtccgctgttcacattaggtaggtagggctcgctgttgatgttgtacattctatggatttggacacacgtaatgacatgtatccaccattacagtatcatacagagtagtgtcactgccctagaagtcctctgtgctctgcccagtcatccctccttctaccaactactggcaaccacccatctttttattgtctccatagttttgtcttttccagaatgtcacacagttggaatcatacaatatagagccttttcaaagtggcttctttcatttaataatacacatttacgtttcctccatgtcttttcatgggccaacagctcgtttcattttagtgttgtgcaatatttcatggtctggatacaccacagtctaaccattcacatactaaaggacattttggttactttcaagtttgggcaattatgaataaagctgctataaacatccctatgcatgtttttgtgcagacatacattttcttcataaccatttaaacgtatacagttcagtagtgttaagttcatttgcattgttatacaaccaatatccaaaattcttatctgacaaactgaaactctatacccatcaaacaacaacctctgttcctcattcctgccaaccaccattctattttctgtgcctaacaaattcatttgacacaggtgcctctaggtgcctcttaaaagtggactcataagcgtttcctttttgtgactggcttatttcacttagcataatgtcttcagtgtgacagagaccagagtagcccaccattccctttgaacattggtattgtaccacaaaatcaagtggttttcaaacatttttgatccgtgggagctttttttctaaaccatgtatacaaaaaaagtcaaaagtggagaaattcttatttcttagccttggcacctgtacaatacaattggaaggggttggggtggggcttgtccagagaagtccccacaaaggtgccccataacactagactgtactcagtctccatcgtgagactattatttataatagtgatttgtggcatttaagatgtgaaatttccttcaaaatctcaaacattaagttgtgttacatgccaatttaaatgtcaaatgtatattatttcattcaaattatctgaaaaccattcattcgcatatcatgagaccctttagaaacggaactacttgactaaccagcacttcccattctccaactccagcaagtgacagaaacttgcaggcattgacacaataggggaaaaaaaactccaggactttaaaataatgagccctgcagggttcagattcctgctccgcccgagggaagtctcatggtagagcatacaaggactttagagtgagacaggcctggtcataaattcaagatcttcttactagcattaaaatcctagatgagcttctcaacccctttaagcctctgtttttccactgggaaaatgatattaataataacttccccataagattcttaagaggattaaatgagaaaacatatgttaaagacacttgtcacattaattggtgtttggtaaatgttatttcctccctcattcttactgactttgagatcctgggaaagccatttaatccctctgattcttaatttcatcatacctataacaccttctaggatagaatcctttacaatttagcttatcctgaatcccactcctaggccagttttctacatactctcactaactcctgggatttcacccatcacccatcagctgtacactgataagtcccaaatctatacctccagcccaagcctttctcttgaggtctagacctttatgtctggccatttcctggacatcttcacccaatattccatgtgccccttaaattcaacatggccatacctagactccttaaatattgcttctcaaatctgctgctcctcttggtgacagccaccaccttcttcccttaacagacacctggaagccatccaggaccctcactctttctctctgtctctcctattttttattaacccaaggccagcaaaccctgttgcatcaaccatcttgatgcctttcaagtccctccccacctccttggccgccgtatttctcatctgtgttcctgcagcaggatcctggctggtctccctccatgagcctgctctcccctcaccctcctgcacacactagtcccttctacacacttctggcagaatgctttctttaaatcagaaagctgaccatttccctctttcctaaaaccattcagtgtttctgccttgcttttggaacaaaatccagaccatctgacatgcagcactcttcacagtcttaaaccttagggcccatcttcatcttgcccacctattccttctccacaaaggctgagctgtttaacagtgtaccaaagacctctctgttctttccttctctagggtttgtatatagaccactgtctgctaggatgtgcgttctcttccacgcgttgctcagctcattctaactcatctttcaaaactcctcaggtgtcaccttccccagggacccctcttttctcttgaaccctgtgttagctgcccatcctgtaagggcactgcttatctgtatcacattaattgagctactgtacacagagactgtgccttttatttccatatctccaacacccagaccagagctgttaagactgaatgaataaatgaatgaatgaatgaatgaatgtgtatacattgtgtatacacgaaggtatgaaataataaataaagcatgttaagaatgttttgtaaactacaaagcaccaatcagttgtaagggcctgttatttctgtgtacatatatagtatatacactttatatctactttttttttttttttttaagagacagggtctcactctgttgcccaggctggagtgcagtggcacaattacagcctactgtacttgaactcctgggctcaaatgatgctcctacttcagcctctcaagtagctgagactacaggcacacaccaccacatccagccaactttttatttttatttttagggggagacaagggtcttgctgtggtgcctaggctggtctcaaactcctgggctgaagcaatcctccatttttgtagacagctcctgccaagggcagcattttcttattattaatttgcctatgaaagcacaaaattatacattctagttggtaaaaataactcttgggttagtgtgtgtgcatgtgtgtgtgtgtacacacctatattattctaagggacttatgggaatgaatttaaaatcttgagtttcagatattgctggaaactggagacagaatctcagtttaggtgtcagcaccaaaattatcctgccctcccctccccaatccctaaacagccctgatttctttttaaaagtgaactttgttcgtatgaaaagaacgaacatgttctgcaacttccagaagttcttacaaaattagttatgcagattatccatatttagccctttaaaaaataattttgaacattagctccttacagaaaatctattttctttctccttttctagaggaaagggccttctgagggcaaatcgtgtgacagtttatagattgtcatctctctaaagacctcaaggaaaagaagtattttctatgtgcaaaacggtacctcttttttccacctttatgtcctttaaaagattagataaaccagctcgcacctgtaattaatcccagataactcccagttactgggaccgggagtagctgaggccagaggatcgctcaagcccaggagttcaaggctacagtgagctacgatgtcaccactgcttttctgcctgggtgacagaacgagactctgtccctatttattaaaaaaaaatcagacaataatattagtaatttttaaaaaataaaaaatatttaaaatctttaaaaagacaaaaaagactaaggaattttttcccacttttgaaaaattaacaaagataattaccttatcagcaaaagtcaacacactccatgtgagcctcacagcccccagccccctggctcagcagaggacccatttctgaaaaagtgtgttgaatgacaaggtttataggctgcaccattatggcagctaccagggaggcagagaagagtatcttcctcttcagagagagcctgaatgttgtgtgtgactgaaaagtcagtactataatatattcaagaagacctaagggtttactttccaataaggatggaaaaaatctgagcaccccactgtgagcttatcgtaatgctgcttcatataaaaagttggtaattagtccctgagtgaataaagtagaatagatgataacagattgatactaagagaagcacaaaatgctctcgccagtcatcaaaatttaaaggctatagagaaagggttggggatgcctctgtctgtttacatactatttccaactcagaatttgtaatgatagggtttattaactggtgtttttaaattgtatgaaaatgaagcttatataaatttcaaaggaacgcacagagtgccaaatgcaggagcctttgcaatccagcctaaaatgccacagaagaactggtggaaatttttatctcatatccatctcttttcctccagctgggggtcttttgctaaaatccagatgtgggacaatgctatttaatatgagaaccaaacagcaaatttcaaaaacatgtatttctgggaactccagaacatgtaatcatttgtctagattttggtttttttaatataatttaatatcaattcacttgtatatttctgttgttagagactcctgctatagatgagttcagactcccaagttgccagctactatccattacttaatatggaataggacttgatttttattggagggacattccagagaaaatggaaatcaggacgatttcagtgtttacatttgggccatagctttgcattaaacatgctttccctttccatccccaagttctgagaatttaaatttctatttatatgggattcatgttttaattttcatgaaaaagtatgcattttcatcaaaactaattccatgagtaccgaggaaacacacttaagtttctaaactcttcctaaaaagtaaatacaagtgaaccacataaatgagtgaaaattccaggtcttctgggaggtgttatcatttgtattttggcacttaatctcttccattgcttttaggtccttgtgaactatctgtgaactacctcaattacagtggaaaatccagggtctacctgtctgtcaggtccagtccgcagcatcccagggactgattccagtccaaatgagaacataagcacgtttcccttaacacaaaactgaccagtgaaaatcctcatttgcaaaacatgtaaattagaacttgattattcagatcacaaaaggattcatcacaggactttttgaatagaaaagactattacatgtaaagtacagtattttatttcagggagagatccattacatatatgccaaatttttgaaaatcagtttctagttagaaaaaggaaggaaattggcttgtgaaataatttaacaggtcaaattcacaattgtatcaatcttggacaaatgcaccaataatgtgaagcaaggagttaccggtgtattccctggggatggctgaactaaagcatatcccttatccccaggagcttacggtctgcatagggaaacagacagttaaatagacagaagccagcatcaaggcaggcagcagagcaatgatcctggaatggcatggtcagtaaatgagaggaattcactcagaacttcttcaggatcattgccatgtgtatagatgtagaaacaaaatagacattcggcaagtaagaatctttgggacaattagcagcatatgttttattatttcatgataacattcatcaaaatagcttaatgggataattaactcaggcatgtggattcaattctgatcagctttagcaaaaaatagtatatttagccaaaatatgagacacctatatattttcctgccagaaggaaaattgcacatatttcccaagttttgggggaaaagggtgtcagtttggaccagtattcatagaaattaaccatcgaggctggacgcagtagctcacgcctgtaatcccagcactttgggaggccaaggtgggtggatcactggaagtcaggaatttgagaccaccctagtcaacatggtgaaaccccatctctactaaaaatataaaaattagctgggtgtggtgacacaagtctgtaaccccagctactcaggtggctgaggcaggaggattgcttgaactcaggaggtggaggttgcagtgagccgagatcgcaccactgcactacagcctggcaacagagcaagactctgtctcaaaataaaaaaaagaaagaagttaaccattgaatgctgagctgaagactctaaattatcattctataatagtaagtggataaaccaaaacttatgatctagcctttgttttatgtttgttggtagttttctttctttttgtttttccttaacagagcagcatagtttatcacagaatgttaaaactggttctcaaaaaaatacaattatcaaaaaaggaaagtttcaaacaactttctaaaaagggtattcttcatttttcttacattttacattcattctatgcaaatttctacatcctctctattaatctctgactgttactagctttgcttgctggtgagagtatttttcactgtagcgtaaaataatactgcatttcaaatttttaatagtcatgttttaatcactataatgcaaaacaaatgtagatttttctatcatgtaccaaggtaggacatattgaaggtatttctgattgtttatattttgcaattttgaaccaagtatgactctggatacatagccatacttataaatatttttaagtaacttaaaatcatttttaaaatatattaaataagacaggtggaatatgctttactaactgtaaagtgccgcatgggtaaaatgtccagagcacaccaatgtggttgccaatttaaatgccaccggaagactcagagctccttattgtgtagtatttatgtttgtacaactcatcaatgaataatcaactatgtttgagtctgccatctcactttgaaagagatatggtaccaactcactacataactatttcagtactaattcctcactgtttttaatttgggtcagagacttggggatggaaaggggaagcatgtttaatgcaaagctatggcccaaatgtaaacactgaaatcgtcctgaacacacttcaacagcgaatgtatgacagcccagtgtaaagccatttagaaataacaagatggacatgtacacatatgtaggttaagttcaacagtatataatgcccaaaacagtatatagtgggtatgaattacttgaaccgagtttagtatctttatccttttagtcatagtactgtgtggttttctccatattctctttcttatttatttttgtccaattagaaaataaagcagggcagggtggctgcatctgtttactttctgagcatgggtgtatgtaaacacacacacgtatctgtctattttttccagaggcttctatgtacacatcatataaaagtcatactgttaacataaatcaaccccagaagagaaattccagcataccgttttcccttgcctattgtctgtgtgtgtgtttgtatgtcagtctgtctttttttattctggctttctctcttattcagtatttataaggacctttagggcagatgtctaaaaacaactgcatagtcatcaggagttaggcggaatgaaatgcctttgctcatcttctctacatgagtgaccagaagaaaaaaaagaaacacagagtatcagactttagaaactacatgcaggttaaagggcactgaccatcctggcttgtgttctgcctaaaggacaaggctctcatttgataaagatcattagtcaccaagatatatattttagagagttcccagtagcgaatattctgttggcagtcactggagtgtaccagatggttcattagcataggctagacaagtcaaagactttcagaatcatttagaaaatgtcaaacagaaacaagaatcctgtcactttttattagaattaactacatcataccctggacacagatttcaccttgggtcagaaaaattaatacagaattatatgaattgtgtaatatactgggttaagataggtctttctccagggactcatttgctggcaatatattaagatccctctactttaggaatcctcaatcctttccttttgtaagatatgaaaagagttgaccttgctcaaaatccactggtgtctaattgatttgaggtatatgcagaatttcaacaagacattcttctaaagctcttttgtgatccttttcccaggaagtttggtgagtggggtttactgaatattcagcagcatgtaaagtatgtttatgtcaaaaggaaaatacatccattaattgaacacattgctttagtaaacaggaattgaaatgctattgaaatgttgctttttttttttttttttttaatgcagatgtcaaaaaccttgaaaacttccagctggtagaaggtgtccaggaacaagtcaatgccgccctgctggactacacaatgtgtaactacccgcagcagacagagaaatttggacagctacttcttcgactacccgaaatccgggccatcagtatgcaggctgaagaatacctctactacaagcacctgaacggggatgtgccctataataaccttctcattgaaatgttgcatgccaaaagagcataagttacaacccctaggagctctgctttcaaaacaaaaagagattgggggagtggggagggggaagaagaacaggaagaaaaaaagtactctgaactgctccaagtaacgctaattaaaaacttgctttaaagatattgaatttaaaaaggcataataatcaaatacttaatagcaaataaatgatgtatcagggtatttgtattgcaaactgtgaatcaaaggcttcacagccccagaggattccatataaaagacattgtaatggagtggattgaactcacagatggataccaacacggtcagaagaaaaacggacagaacggttcttgtatatttaaactgatctccactatgaagaaatttaggaactaatcttattaattaggcttatacagcgggggatttgagcttacaggattcctccatggtaaagctgaactgaaacaattctcaagaatgcatcagctgtacctacaatagcccctccctcttcctttgaaggccccagcacctctgccctgtggtcaccgaatctgtactaaggacctgtgttcagccacacccagtggtagctccaccaaatcatgaacagcctaattttgagtgtctgtgtcttagacctgcaaacagctaataggaaattctattaatatgttagcttgccattttaaatatgttctgagggttgttttgtctcgtgttcatgatgttaagaaaatgcaggcagtatccctcatcttatgtaagtgttaattaatattaagggaaatgactacaaactttcaaagcaaatgctccatagctaaagcaacttagaccttatttctgctactgttgctgaaatgtggctttggcattgttggatttcataaaaaatttctggcaggaagtcttgttagtatacatcagtctttttcatcatccaagtttgtagttcatttaaaaatacaacattaaacacattttgctaggatgtcaaatagtcacagttctaagtagttggaaacaaaattgacgcatgttaatctatgcaaagagaaaggaaaggatgaggtgatgtattgactcaaggttcattcttgctgcaattgaacatcctcaagagttgggatggaaatggtgatttttacatgtgtcctggaaagatattaaagtaattcaaatcttccccaaaggggaaaggaagagagtgatactgacctttttaagtcatagaccaaagtctgctgtagaacaaatatgggaggacaaagaatcgcaaattcttcaaatgactattatcagtattattaacatgcgatgccacaggtatgaaagtcttgccttatttcacaattttaaaaggtagctgtgcagatgtggatcaacatttgtttaaaataaagtattaatactttaaagtcaaataagatatagtgtttacattctttaggtcctgaggggcagggggatctgtgatataacaaaatagcaaaagcggtaatttccttaatgttatttttctgattggtaattatttttaacagtacttaattattctatgtcgtgagacactaaaatcaaaaacgggaatctcatttagactttaatttttttgagattatcggcggcacaatcactttgtagaaactgtaaaaaataaaagtatctcctagtcccttaattttttcataaatatttctggcttttgagtagtgtatttatattgtatatcatactttcaactgtagacaattatgatgctaatttattgtttcttggtttcacctttgtataagatatagccaagactgaagaaaccaaatatatgtgtttactgtagcatgtcttcaaattagtggaacttagttcagggacatagaagagtcttaatgaattaaaatcattcacttgattaaatgtctgtaaatcttcatcattcctactgtagtttatttaatatctattgtaaattatgtgacttgtagcttcctctggttttcaagtaaactcaacaaggtggagtcttacctggttttcctttccaagcattgtaaattgtataccaaagatattagttattacttctgtgtgtacaaagaggattattttattatgtttattaatcacctctaatactcatccacatgaagggtacacattaggtaagctgggcgttgactcatgcgcagtctcagtcacccgtgttatcttcgtggctcaaaggacaatgcaaaatcgccgatcagagctcatacccaaagcattacagagaacagcagcatcattgccctccccagctgaaaaacaagttggctagaagatacatggagaggaatggtgtggtcaacagttaatgaaacggttctatcatgcatgtgtaatgtggatggagacaattataagatttgactataactatttggagggtctttaacattgccaaaaaaacaaatatgttgatttttattttattttattttttattttaagaggcgggatcttgatctcacatgttgcccaggctggccttgaactcctgggctcaagcattcctcctgcctcagcctcccccatagctgggactaggggtgcatgccagcatacctggctacgttgactcttaaaatctatgttctcttattttaaagatacagtgctccccactgaaaattaaacctaaaaaatgtcacatattggtatgttgttaacctggtagattaaatcatgagaatgattagaaagacgggcaacacagcgggttacatccacactgctgatcacaccaacgacaggagctgataagcaagaaagcgtcacagccagcgtctgttcacccaaggttgacaagtgaagtttctctaatgttgattgttagccgatttgtaacctggcatttacttagcaactgccttatcaattacaggatttgccggtaaaagcagactcaaatataaaggtttttggcttaacttggtttattatagttgctctatgtttgtaaacagacaatctctaatgtctgattatttgtatcacagatctgcagctgccttggacttgaatccatgcaatgtttagagtgtgaagtcagttacttgttgatgttttcttactgtatcaatgaaatacatattgtcatgtcagttcttgccaggaacttctcaacaaaatggaattttttttttcagtatttcaataaatattgatatgcccagcctgataatttttaaaagtttttatgttgtcctcattctatcggatactaaagcttctaaataagagacttgactaggagtgaaatcaaaagaatcccacaggaatagatacttttccctttagataacttctagagtggttggctgtccttccatggatacctgaagcattaaattcaatctgagcatcatctctacatgtgaaacaaagtattttatatcatttactgttataatcaataagcagaaaaatcttaatagcatctcacttttttgtagagcttatgttgtcctgataactttcccaagtgctttcttaattcacttggtcctcagaacagatccaggaggtattattattctcatattaaagccccttgcacaaaaggatttgatacactagtcagaggagtagcgggaatttgaacctaggcagtttgactccagaatcaacactcttaaacactacaccattctgtctctagaccaggaggacacttcagatttgcttcaaaaggcaaagataggccgggcgcggtggctcacgcctgtaatcccagcactttgggaggccgaggcgggcagatcacctgaggttgggagttcaagaccagcctgaccaacatggagaaacctcgtctctactaaaaatacaaaattaaccgggcatggtggcacatgcctgtagtttcagctatttgggaggctgaggcaggagaatcccttgaactcgggaggcagaggttgcggtgagctgagatcgcgccattgcactccagcctgggcaacaagagcaaaactcagtcaaaaaaaaaaaaaaggcaaagatattggagaaaatcagacatcaggtcacctcaaagtatatagatatttatcaataacccaaacataaagcctttatactttatggatgttaagcctaaaaagtaagatgcccatgttctagaaattagcctccttcagtaccattgtggctttgcagatgtttaaggcaataaaataactatgaaatccattttcaaaattaataaaacctctattacaaaatagtgtaacagccacaaaacacttaacaatgtttaggaaacattacggtccagcctcccactttacactccacccttcccatccctactctgggccaagataagcaggaagtgctcattctttcccaagcagatgccaatttttcttaggatcctacaaaaagataccatggagtccaacccaaaatactgcacttagagtccagtgagtatgaaacttaaacttattttatttttatttttatttttgcccaggctggagtgcagtggcacgatctcagttcatcaacctctgcctccaaagctcaagcaattctcccacctccacctcccgagtagctggaaccacaggcatgcaccaccacactcagctaattttttattttttgtagagatgaggtcttcttatattgcccaggttggtctcgaactcctgggctcaagtgatccttctgccttggcctcc

SEQ ID NO: 407 - DNA, 311770 bp, Homo sapiens
  source 1..311770: mol_type = genomic DNA
ttagtaggacccaggaggcacactcctccttcctctcccaataccgaacctcccgggccacaatcattaagaggaagaagcttaacaaggctcacagggacacatgcttcctccctggatgctgtggactcgtcagagaaagctgcaaatcccattttcccctgttgcagcaggcaatcattttttgcatgatcagatcacaagctgattatcaaaactggtttgcactgtgtccagaggccactttttcctgcaagcaggtttctctcacactgcatagagcaggggagccctctggtggtaatctgtaggaaaatttcctgagcgggagggatttgcttaatttgggtaagaattcttcatattcttttcccttgcctccataagccttttccaaaattgcggggcgcggtggctcatacctctaatcccagcactttgggaggccaaggtgggtaggtcacttgaggtcaagagtttgagaccagcctggccaacatggcaaaacccctgtctctactaaaaatacaaaaattagccgggcatggtggcacacacctgtaatcccagttacttgggaggctgagacacgagaattgcttgaaccaacccaggaggcagaggctgcagtgagtgcctctgctctccagcctgggtgagagaatgagactctgtctcaaaacaaaacaaaatcagccattagaggtaaaccaggcctgttgtaagccatctgaacaagaaagttcataccatcaatggaccaatgctttttggggtcaagattgcatttctccagaccctttttgctaaagagccccaggactgatgatgaggacaaagctatggactgtgaatttggcggacgttgtagaggggaggagaggccctgaagtgctgttctgaagtgagtgacagacatgccctccaggtggaaacaccaagctctacatagcactttaaggttcacttatataacatgtgatgcaaatcaccatggaggagggcagctctgagccagcaggaggtcttgtcagtgtgatgctgggactagggggctggagaataaggggcaggtggtggaacatgggaacacgccagggcttggctgtttgccagagggtttgagaagattagaagcatgggggtggagagaagggagagggtgacatacattcgatacctgtagtgtccctcttcagacaggagagttaagaaatctaagtcgcctgtgattcgggagggcagagtccaggcaagcagaagagaagcgccgggcccaggcagacaccaggagccaggctttgggaaaggaggcaccacctgatttcttgaacttttctcaaaaggctgggaatatctagtcctgtttttcattcaaatgtttttgatatgtcctattagatctgttttatattttgttttaattttctctgcatagaacagccttttgaaagtaaaaaataaaatttttcaccattttaaaacattaggcaatatatgtttgaaaaagttaaaagtcacaaagagatcaagactgtttaatagttacttttttgagggaaatccagtcacatttgcctgtaccattacatacaccattacttggacattcacactcaattgggaacataaattacaaaagagagaggaacttttaaaaccacatttaatttttaataccaaatctgttgcactattacagaagtgaccctttcatgcacagataaatttcgcatctaccagtatggaagaggaaaaaatgtagttttattgttctcccaaaatattggcaaatttaaagtaacttttaatctttgtgctctctgatgccaaggcaaacctgttttgtctttttatattttcaagagacaggtggatctgtgaaaaatgaatatagagacatgaaagtatttagggccatctttacctgggattactttaaattatgctttacctacatatatcaaacatgccaggttactaggcctactgtgccccataggcaaagctctgaagatttcatcgaaaaatctgctgtcaatacgtagaaaagttcactatttcagtttcacagcaaaaaaggtggggggaggggggaacccaatagatatttaagtagatgctttccaatcccattcactgcattaattagcttacctcttatacagtacaacataaacattgcatgtttatttgtatgtaacacctataagcatatagcatctacattttaagtgtatttacaaattcaacaaaatatctacatataaaaagctttacttaaaattaaacttgatgcaagttatgagaaaccaatttattggcaaatgaaactgagcattccttcaaccataggttgttatagattttcatatttggaggtaacccatttgatagatattgtttatgaatacgatagaatatatatttactttttaaactgcagatgtaatcccttggaccgttggccttttaagcacttgcctgatttcttagattctgaaatgtatccataacaatttgcatacacgttgtttaatgctgcagagttttgaacacttacataggtaaagtcttggagaataatatattactgttggcatgctgttgtatgcttttagtgttggaataacttagttttaaaattaattttctagcatgttgacatctttcttactgaatgtaatagaaaccataaaggaccacaaaatcatcatgtgcttcagttggcaacaaagattttctttttatgcttatgaggaaatgctatttctaataaactgtcttatttttattttcatgtttccttcttttcccagcattgcagttttcatgaactctgctttttaaaagttacttttagacaatgacagtaatctaggacccagaatggactggaccagctgatacagaatgcacgatgttgtggaatgcttaatatctgaaggcactgtatgtgtcttgccctgtgttctctgaaataatgtttgaaatttaatttggatgatttgtttttgattctttcagtatggcacaaatgccgaaatgcactgcaatacacattgtttatgcctaaaaacaaccgaacatagaaatgatgtaaaaagtagaacactgtgctgctgtaatgcctggaagattaagaagcctacggagtaacaggagccaagagtaggtaatagttctcagtaagcatcagcaatgtgactgtcataatgaactcatttagcaagtatatactgtacaaactgttcctaacagtctcccaaaaagactaacgacagctatacatagtcaccaatttcacaacaatgtccacaaagacattgaagttctagagaatactacagtaacattcttgacaatgaaaacggaattcatatataggggttcagctgagggtagtataaacaaagtatcaaaccatgttttcataacatacacgggtatgtcctttaaatgtggagcatttttcatgcatcatattgaactgtatcctgcagaggaaataacaggatctgttggtgatgttgcattattttttatcagttctgaggaaatcaagaatacccattttgaatgaaaaagtatgcactttgcattccagttcatattaacatatcatttgactgagttatgtttttgctgtaactattctcataatactaacatacagcagaaaatatactctctacccatatgttcatagtatgagagggctgacaaacaagtgcttaggataaacattctagagaaatggaatattggcaaagagcttaaaaattaaacaaaggaattcatggcgttgacaggagaaggtgcctctgagctttcgtttccttcagccggctctttctctttcttaccactgtattgtccaataaaggagccatcctcattgaactggccattaaccccttctccatagtcaactaggctgtcgtcactatcttcttttttcacagtcctgtctgaaggagttcgacttccttttttcaaaggcttgtggtcttctgcatcactggaagaaagagaaaacatttttgtcaagattggcatttaggtaacattttctgtttttaaagaccatgcatgcaaattatgagaaagcatttggagtcctgggcttctctggccaaatctaattttcaggttgactccaatgacgaggatgagttggaatggaaatcaggagcagaaatggttgaatcatgaagtcttcagtagagtggatggctcccaatagtgtttgttaatttcaatgacaaattctgattcctgagttgaaagcaatccagaaataatcacaagcattaaataagaaagaattcagaaaagtagaaaaatcatcactattttgaattcaaaaaggcaaaagcttatggcaagtaaagaagttagtatgttaaactgcataatatctctgattccttggttgtgaatggagcatgattttggttaagtgtgaaatgtggattttttttttctgagccagaaggagaagcaaaatcctgcatttcaaataattttgttatcaatgcaggccagactgtaaacttcaaccttacctttcaagagacctacaaaattccattaaaaggatgcagaagaaacaaatgaaaacagcctaagaagaaaagcaaaatccttatactgatagtacacagtatttttttgtttttttggtaaaaattttagttaatgagtaaagatttattaatctggaaagagacgcactttaacttaaaagctctacatttgtactatgaatggcatgccaatatattctaaagaatgtgaatgactccaaacatgtaatagcaaatgcttcctacactcatgttaaccccccagctcccttcttccttgtgtgttatgcagcctgactatactggatgggaatctgaggagtgtactttaatacgactttacaagattccattattacaatttttgcttatttctctgttgaacccgtaagcacaatttctggaagacaaagagtaatcattatgtttttgaatgttcacccatacggtcaaatacctagttatgcatattgacctattttttaataggtaacatttgggaaaaaaatagaaaaaggcaatgacaggatctaacattttgttttctttcaaagaacaaaaatgcaaggcaaaataggaaacatatacatttttactaatgtaaaaatgaaaaagccttaacatacaaaaggtatcactggctgcagtatttaatctagcaatttctgctaagactttactgctccctctgtttcagacagtgactttttttttcaagccaagatacaaacatttcaagatgcacaagtatcctggctcttttgacaataacttttactagggatttcaatttttctccaagaagaaaatctgaagactgggaaataatgctagcataatatgacactggcatatgccactgaaaacaacctgtttcagtaatacacaatttcttattgcaaactgaataaactatattttcaccactgctaataaacaactggagaggtatcatcttggggtggtctgtgtttgtgagcatttcagaggacatagcattgagtgtctaacctgttatgaaaatagcctacacaacatctctggggtttaattattaaatccttcttgtgaaatatagttcatgtttcagtgtgacagttaattcagctgaagagttcaataacaggcagaatttgtcacctggattccaatgactagtcttattctgctctgtagaactagtgtcccaaggaatacactgctggaaatttgtcatctgtggcatttctttggtctagccatctatccacccatgccttcatccaataaatgtttattgagtgactactctaagatagattgttctcggcactgggaatatagcagcaaacaaaacagactaaaaccctcacctcactggctttatttctagtggaagaaaatacaattaacaatcaacataataaaaaaaattacatatatattatgtcagaagaggattagcactatgcaaagtatagagctgagtaaagactgcagaaggtgttggagaagggatggagagctggcatttaataagatgtccaggaagacctcatcaagcagtaatatctggtcaacaactttaaaagagttgagttagcaaggtgaatagttggagggagagcagttcctgcaggagtaacaagcagtataaatgtctcggggtgaggggaagcctggcaggttctaggaacactaaggagcttggtgtggctggggggagggagagagagagagagaaaagtaggagttaagtaaggggagtggcacggctaaatcagggcttgtggaacattgtaaggacgctgcctttaactctgagtgagacaggaagccctgggagggtttcaaagaataagtgacatgctctgacttatattttaaaagcactactctgccatcagtgttgagaatagcctaccttagagggctggggttggtaaactacagtaaaattaggccacgcccatttatcacataatgtctatggctgctttagcactacaatagcagaattgcagagttgcagcagagaccgcgcggcctgtaaagtctaaaatatttagttggccaacctctgctctatagagtcaggggagaatattacaataatccaggagtgagatgactgtgacttggaccagagtggaacactggaggtggtataaaatgctcagattatgaacatattttgaaggtagagccaacaggattttctgataggttagacatggaataacagagaaaaagatggtgccaggatttttggtttgagcaacaggaagcttggaagtactgttactatggagtggagcatgttgggaggggaaaatcaatggttccattttgagatattaaagtttgaatatgtcatgagaaccactcctttaatcattttttgaggctagtataacattgatatccaaaaccaataagaatgctttaagaaagtcaaactacaggctaatctcattcatgaacatagatgaaaaaaccccaaacaaaccatgaccaaaccaaatttagcaatctatgaaaaagataatatttcatatccaggttgggtttattccaagaatgcaggcttattttagcattaaaacatcaattcatataattcattattttagcagaagaaaataaaaatatgataatctcagtaaatttagaaagaggtatatgaaaaaactcaacacccattcatgataaaaacattaggaatagaatgtatttttattcctaacattaggaatagaatgtatcttcattaacctgattaagggtagcaacaagaaacctaaagtaaacatcatccttaatggtgaacactgaaaactttgtttgaaatcagaaataataataatgatggctgctatcaccacttctaatcaaaactgaattaaaagtcctaagcaacttgataagaaaaagaaatagatgaaaggaagctatcattattcataactgatatgattgtgcatataaaaaatccagaagaatctacaggtaaatgttagaatataaagagattttaataatgttgcttgatacaagattagcataaaagtcaattctacttatgttcttgcaaaaaattaggaaataaaattcaaaatattattccatttatgagaccataaacatgaagtatataaagacaaatccaacaaaaatatgtgtaagacctccgaagaaaataaaactttcagagttattaaagaagatctgaatgaatggaggaatgttctacatccatggatagaagactcaaatatagtaaatatgttaaccttccccatattgccctttagctgcaatttatttccagtaacagctcagcaggtttttatgtggatcttggcaggctgattctatgatgtacaaataaatgaaaagggctaagaatatttaaaaggttcttgaagaagacaactaaagttagagaactggacctagcagatatcaagacttattaaaacctatattattaagacattatagtcttggtgcagagatagacagattgaccaatggaatggaatatagggtcttgaaactggtggaagatctttttgttagctttattcctatgtcatatttttatgctatcataactagaataagttttaaagtcttattttccaattgcttgctgatacatagaaatataagacttttatgttaattttgtgtcgagcaacattactaaactctcttattataatatttgcttgttgattcatgtgggtttttacatacaaaatcataacagttatcattaatgaccagccaagaaggggctcccccaaaacatccattcacgccagcttaacggctgtggtggaggagagaatcaacagcaacacgggctgtgcttgaaagaagagaaggaagtgggattctccctcctccaacagagtctttccaggaaaagccattcaaaggcagtgagatcttttgaagaccagtctttaataagtggtgtgatataatatcatatacttcaataattagaatccggttaaatgagaaaaaattatataagtcatacacacagtgctgggtttgtgttcaacaagcatacatgtccatctcccatcacatctcttctctccactccaggtccctacttcagagagatttttttttcctaagaaataccttgtgcaacacacacgcggaactttccaggtgtagtgagtggttatgactctatgagaagcacagtatgagggcttgcctttttcaattccaagatgaattttgtaatgaaatagtaaataactttttgacattgtattcagtgaagttgccatgtcaagtttaaatatgaaaggagagtttcccaaatgatatgaatcaagaagtcatagaagatgatttaaaagtcatatatatatatatacacacacacacacacacacacacacacacacacacacacacatatagcagaccttgattttaatcaagttttaatggagtaggcagcagtagtattcaaagctttacaaaacaggtaaaaattcattcacattttaatgagaaagtttaaggatggtgtgtatcagacattaattattagttttggatgtcaaaggttgaatggatttcaaaataaaatatatacatattatataaatcatattcacagtgctggcatatatatatatgcacctacaaagtatccagtatacaagtattgatacaatatcaagtatattcttgatacttagattcatgaatcaggatcattgtgcagtggaaagaaatgttcctatcacaatgctaaaactgcatgacttcccctgggaagactccctgtaccatcctcctcctatgctgcccacctggctttaccttcctgcttctgttcccttggtaccttagttatatctctttcatagcacttttcacactctggtcattgttcttttacttccctgcatccatcactaggctataaactccctgtgtgggaccaaattctattggtttgaatattcccaaggcctggcatacagtaggcactcataaatactggcagaatgagttcactgtaaaataatagaggagacagtgggcattttagaaaatttttttaaaaattctaacataaaacatttcattccctcagttttatgacggcagacaaatcattggaatatatcctttcctttctctttccctaagaataaatttttagggagttcaaattgtttttcaatagcactttgttcagaagtgtgcacatctgttaaatcctactgagtaaaattcggcaacagcaggtaaatctgtgataattctgtctgattttcctgttgttaccaccctcccatggccaaaccacattgcagctcaagtaacattcatgacccaaatactctttcctacccactcgctaaaagtccattattattttactcacaagccagttcacatttgagagcaaaataactctaatgtatataacgaatgtgacacatcttggcatcattcaagccttatgagcatgggttagcatgcttgccacaagcccatgttcacatgaatgacaagattcatgtggcaagagccaccaattatgtagtaagttatgagttcaagtaacatgggcatatggtttatgacctaggtttattctggttttaaggaaaatggatctaaagaataaaaaaatacttacactcttggttgcattgtttctctgatttttctatatgctagtaaggatgcagatcctactgtctgtataattaaagaaacaaacaaagaaagctgcaggcttccaacagagggtaactgcttgggggtgggtgtcagagtaggggcacagggttatagcatataatcacatttggccaccagtgaggttctatccctctttgcactatgaaatatcatctggcttagagccagccatgtagaaacggtttcatcatcaaactggagaatgagcaaatcagaaatggaattaatttacacctaggcaatagtcctaattttgtatgtgtctggtcagcataataatttatttttggaatgaaagagaataagaatcaataaataatacagagctcaaaacttccagaaagtgcaaaacagagacaggaacctggtgatctcaggaagtgaatgacacttaaatgtattaaaaataaaagattctgttaataaacagttggaactgttttcattaattacagcctctaagataataaacactttttggatttcttcaaatagaaaataaaccaaagggaaaacattctgaggtagtgtcaggaaatcaaaggacaaagccgtatctttgtaaatcaaagtaaaaaatgtggttggaattttggggaagtgattttgcttgtgggattgtccttatgaacttttagtttcattgaaaaaattacatcattgagttatgtttcaagttgaagacacccatcagaaccttatttcccttagcacctcccaaatttatgtcattacatgtatgacaaatgtacaagtgtttttgtcttcgtgtcaattgggtttgcactcaataagcccaaatgcaaagtctttctttcctgagaaactaaggcctaaagacagctatttgaaaacactttaccaacatagcacatataaattaacactaagacaaagacatatgaccaaatagatgtaaacacagtgcttatgaggccagtaaccaaatacttgccacgtactgctccagacacaaaattctattaaagttgttagtagatggctcatagaagaaaacagaaatcatagaactatgaatcacaggcaatggctgagttgaaagtaaaactaacagtcttttgattccaagctagttcataaaactcaacctccattttttagaacagatccagggggtacatgtgcaagtttgttacgtggatacattgtatagtggtggggtttgggcttccagtataccatcacccaaatatcaaccttgattttagtcaagttttaatggagtaggcagcagttatctgggaaagtcacatgacctcagatcatggtttcacatcgctgtaagagcaagctgatgtttgagacccaggtggtgagtagtatgttgctagattcactgaggcatgataatgtagaacaggaacccatcaccatgtggagaatgtatgaaggacaatgctttatttccaattcatgcaaatacattttttttcagggccacattaaagattttgcttcatcacaatacataagggagtggtatgcatatcctgtagataattacagccacaagaactcttagaaataagaagttatttagtaattgtaagcttacctgctttacaggagaaacatgtagaagggtgaattatttcagcaaagttctactcatccagatgccctaggctacgggcttctgtaggctgctctaatgtgttacaaaaccctcttgggtgaactgggtgtggacgctgcatgaggttttcatacaccttcagctccagaaccaacttctgacatcaagacaaccctcactatgcatttttctgtaccatgagatacagaaattctgagaactttttgaaaccatagttatctctctttaagagatcacaatataaaaacttaggggctgagataataaaggaaaaacacaggtatctgcctggaaaatgatatgaaaatgattttattgaaaatatatgtctttttctcaatcagttctacattttttatccttaggattatgtcacatgaaattctatgatattgacatgatagtgacatggaaaaaccaaaaatgagctctagagacaggtaaaacttaacataaatatcttctctacaaatgttgcctggtaatcccaatagtgaaatattttatttcacctaaaagcctcttcatcttgcaaacaatgtctcaaaatgggcttaatgcatatttaaaaggtattttatataagcaaggggcttctaaaaagaaaaaaacaaggtacaaaaggtattttaaaaaggtatacttttagaataacagaatgcccacattttatttaaataaatacgtactttgtttctgtttaatttaaacaaatctaaagtaatcttttccttctcttgaaaagatttatctttgtttaaagagaagatttttaaaaaatttagcacataggttatattaacattttcccttaatgatggagtcaagccaagaatgtattatcaaagttctgtgagtaacacattgcctagagggctacgacatttcttaataagtaacagcttgtaaaacaatctagtcaccatttcatgattaaagggcaagggtatgggtattgtttaggaaaactagtttcaaattctagatgaaaaagtgtgtttacactggttttattacagcatgtttagaagataacaagtatagctttctttacaatgcaggcattggaggttcttttttgttgttttaatgctcatagtagcatattggctttgctagattgatcaatacagcatggtcccatggaaaatatgacaaagtgggagacattccatctccaaaattatgactaaaatcaaaatttagtttttcaatgaaaaatgaaaatgtttgaccatgagggacatgtaaacactgatacatggaagtatccctaaacttctatttgaggaaaatatgagatgccaggcagagcatattctggctgagttctattctcgggactgtgttcatgtgggcagagaagatgaagagcagagaagcaggggctcacctgtattctccaaatgtcccatcatcttccttcataggctggatttcagggtcagcatgggcatcttccttttctttaactaaaaaatgccaaaatggtattattatctgttgatcctgttctttcttattcaaagtccatgaaagcattctttgagatatacagcagtgaaaaataattccatacacaagtagatgttgtataaccatatatatggtggccatgcatatattttggtattttagttatttttgaggcaacccaatagaatgtacattttttaacacataaagttgactagtttctcacctgataaataatttttaagtttctaagatttccccctattttaccaatctatttgttaactatattaatggttgaaaattgtttttgtaagagtattctctcacagattttttttttcttgtcactgaagggaaaatggtcaggtaaagaaaatataaatttaatgggcccactaaattgaataaaccattaccttatagggaaagcaatgttacacatcacaatatgaagacttagttcatgcattacttcctttgaaaaactccatgaaccttccctgcaactctctccttgccagttggttttaggtgttacttcagcatccataacctatgtggagtctaagaaagtaggctcactaatgttttcagagaactgattgatttactcctccaaatgccttatgatcattgacaatgtttagattgccattatataaaaagggatcaaaagtcatttgaagagaaagtccaaactcatggctctgggaagacaaaatattacaatctacatgatttcccccatgatctttttagtttaatggattattatgtagcattataaagcaattttaatctttctttcttacctggatatttaccacccttgtttcttctgatgaagcaaacaatcagcaaaattaagataaggagagcaacagcacacatcagaccaatgaaccagccctgagttgcaatatccacctgccggcttgccatcgctggaaaacaaatcaatggtgttggtggcaataggttaaggggagatgggaactgctgcagtctctcagagtaaaaaattgccacgttatgtgagctttcatatattttacatgtggccccaaattaggatctgtcaattattaatcaggaattatatgaataattaactttgaaaaatcttcattcattaaaaaattcaagtagagaaatctgaataatcatcacattaaatgctaaaaacccctggtgaacactgtgttcacagttattttcactatatattctcaataaaaacaaattcccaaaccaattaaagtattcactgttaacaggatacattttacattaagtataatgagaaaaatacaaaactgagttttaaacagaacagaatgtatacatctaattgagtattttctcttcaaaggaactgcttttagaggctaaactgtccttgcaaggctgttgccattttcagtattttttagaaatctgttaaaaaagaaaacggtccacacaagaaacctttccagatcaggaaaacagccatattgttttatataacatctcaatttgcacccaaaatattacttagatttgttattcatctcattcacaagagttggttctgagtggaaatttctgaaaaaccaaatccaccctcaaagaatcaatattcgttattgctaaggatccattcaaaagaccggaatatctctcagtcagtgaactcattatttgcctacatgaccagtttgaaaagaaagtactcacttaggtgtatacatatcctttcagtttgcatctattctgtttaataaatgtgaaaccccttattccatcagtcataatatgcaaaatttctaagaaaaccacagaataatgagcatttcgggtattattttaaagtatcaatcttatgggaaaaagtgcagcatcaatggctattcagacatgcccatgcagatttgcttaattaactagtataaattcttttttaaaagacctttattttctctcttttgaccataatcaagataaaacattttcttcttttgactctataagcatgcttatatcatgcttttaatttgactgaatttcttccgaatatattttacacagttgagttaggtgtgtgtgatctctggatgcagaaataaacatgactacgcatatcccaggttcagctaatgttgcaaaaatagcatctcattgcctctttttctccatacaaagtttagggagaaaaaggaaatgctaaaaatcaagtgtgaagaggaaggttaaaaaaaatatggacatatgtagaagaaataaaatgagaagcaaaaataccttatttgaaatacaagtcaaaggctggtagccttttcccaataggccctcgtgccttattagagaagttttgagctgtatcatagccacacacaagtaaagcatcagtttaggcagtttcccctttccatacacataccatagtcatgatgatgaagatgaggacaatggtaatagcactgatggctaacagttttggacccttaccataggctaggcactgtgctgaaggcacatctcatttaatctttacaacaattctctgaggtaggcatcagaaataaatccatgcccagagaaggttaagaacttgcccaagagttggagcaacctgtgtctgactccagaaaatatgctactagccattatattatactgctgtaatgcattcctaaaaacaatccagataccaaatctgcaaaaatcttaagttaaagaataaaatgctataggcacttcctattctgagacaggcaaaaaggtattaaaagtccatcattacatcctctttggcaacatatttctttcaattaatgcctggtctgtgctttttcttcaaaactgaaccaaaaaccaaatggcattaagtctcttaagcatttgactatagttcttgttttcagtgtgctgatttacagccttgtcataaatacattcagcatttacatttttcatctaattaaatgcaactaaaaagggaaaaacaagatactcaggtactagcagagatattgttctacaaggatggtgactgccaaaatcgaactactgactggcagtttgctgctatgcaaccatggaaaaactggatggatgtttgatgggtggtacacaaacatccacattcactgactttgaatttctgcctctgtgtctaaagaaaaaagtatcgaatatttcactgccctattatttaaaataggcagacacaatatggtaataggtgcatgtgtgcacacacacagtcacattcacacacacacaagtacaccagaaattgatataaaacagaaactgtgtaaatggaataaaaatttctattgactttccatccataaaagaaaagatttaaattccagaatgattaaaataggcatgaagccttttcaggacaatctaaaatcacctgggacatacaaatccaagccataaccatgatcatgcatcacacacacatacacacacatgcgcatacacacacatataccccacagagagagaattaaacctatgggagttttccttctagaatcagtttcagtgggtggatatcacccattgaagggctgggtagcggagtaaaagagaatcttcattacttgattttttttaacaataaaattatattcatgtattatttgagtaatccacaaaatgataaattaaacacatataaagaacatgaaaacagaaaatatggcaggagaatgagatttgctttgttttctggaagtcagctttacaacagtcttctgctctggcgttgcttgctgtcatggatatctgtgctctgtggtaggaggtctctgaggaaaatgctcttgagtcctcagaaccatagaatcaacacagaagagagacagggtgagggaaatggttatttgttctctactatttatgaagaatgcactatggatgaaaatgtcctgttcaaatgcttagacatcaaacgcttagatgtgtttaggaagagcaaaatgtgaccttaaccaaagtttggagacaactgacaaaaaagctgttgggcctcgtgaaaacaaatctgttttaaatcctttgtgatgataagaaagactgggtaattgagggacagaggtaaaagaggaaggggaggtggatggcattaatgagaggtcacgtctggtcataccagatggggtggcactaaagagaggtcaaacgggggcagggagtggcgctaatgagcagtcataccaggtggggtggcggtaatgagaggtcataccgggtggggtggcggtaatgagaggtcataccgggtggggtggcggtaatgagaggtcatactgggtggggtggcggtaatgagaggtcataccgggtggggtggggtagtgagaggtcataccgggtggggtggcggtaatgagaggtcataccgggtggggtggggtagtgagaggtcataccgggtggggtggcggtaatgagaggtcataccaggtggggtggggtagtgagaggtcataccgggtggggtggcggtaatgagaggtcataccaggtggggtggggtagtgagaggtcataccgggtggggtggggtaatgagaggtcataccgggtggggtggcggtaatgagaggtcataccgggtggggtggggtaatgagaggtcataccaggtggggtggggtagtgagaggtcataccaggtggggtggggtaatgagaggtcataccagtagtacggggaagaagcgcagcatcaggacaccgcctatctcgtctgtttttcagtttgtgccataggaaaaaaattaagaaatataccttagaaatccagggtataaaagggagagatggtgtaatggtaggaagattgatgaaataactatagataaagttgagtccagtgtcctaaaattagcagaaatcagagaaagagagagaagtagatcatgaatgcagagtttaaaaattagccaatgataggctttcatgccaaatattgacatccttacaccgcggaaccgagaggagaggagaggagaggagaggaggagcaggagcaggagcaggggcagtggaagacggtgctttcacactggagttaacccagcagccccaaaggatgaagcattgtgaactgggaaaagggaggcagcgtaatggtaaactgaggcattctagaatgctggcagcatttgctcttacaggcgatgtgttaactaaggtcactagaggtgaatcaatatttgttctttttaatacatttatatgtaaaaagtgacaagaactggttgtgaccttgtcctgtctctccatcactggcacacaagaaggcccacctatcacgattcctcacctcaaactatctggcagttgctgctggaactgtaggcattacactgctgagtgaaaaataattttctaaaggagttgtcttttgtcctatagaaggacaacaaatgctacaacttgattttgagggtgaatctaactttggataaagtcactttttcctttcctaaacatttctaacaattttaacaacaggtcatttttatacatagtagattcttcataaataatccagaaccagtaaccacatgcagcctgcaggggtccagaatcactgattggatataccaagtgttgaccgaagctgccctttctgagacagcctgtcctccttggcctgtggacctttgtgaccctgcagtgggggtatagtgaggcctttcttctggagacggaacgacaagcttctaatcccagctctgtcacgttcctactgggcgacctggcaggtactcgacctctctgacttgaggggtaagtggagtaataatggtgcctacatcataggattgttgtaaggactgaatgagaaaaccacttcctgctgtataggagagctgactaaatgctagtcccattactattattagcattccagctatatatgaagataatatctacttgacttttagtattttgaaaataaaagttatcaataacaaacaaaaaccttgtaaactagctatgaattgattagatattccccttttaagcttaacacactggtttcccaggactatatacataaatggatatgaaatacaaagaacagaataaaatgtgtggttttcttaaaacattatgattttagcaaatgaatatctttaaaatatagtttaatacattattgttgtttctttttaaaaaccacttatgatttatatttttctaaattgtaaaaactgactttaaaaatcataatgctttgttaatgaaagtcacaaaaaatacattgtgtaatgtattctacaggatatgcacatttctttaagaatgcatggagtgaatgaaaataacatgggggtatgaaccacagagtgaacatgtaccacaaacaactcttgttgaaatgtaagtaagcagggattgttctccatctagcgagcaaatacgaatgctctcatgtttcacatgaacatttttctttattttagaaacttcactttttacttgcatattttgttaatattcacataagtaaatatatacaggcagtaaaatttggtgtgataaaaaatgtagcatatgaattgtacaagttcttgttccatacaaatgtaataatatctgtatcagttgtctaagctgactgcagggttctgctgggttgtaggccattttgaaataaagaattgtgactttctttcttttctttttttttttttttttgagacggagtcttactctgtcacccaggctagagagcaatggcgcaatcttggctcaccgcaacctctgcctcccgggttcaagtgattctcctgcctcagcctcctgagtagctgggattacaggcgcccaccaccatgcccagctaattattgtatttttagtagagacggggtttcatcatgttggccaggctggtctcgaactcctgacctcaggtgatccgcctgcctcggcctccctaagtgctaggattacaggcgtgagctaccgcgcccggccagaattgtgactttcttataagttctttcatcttcaaaagcacttaaaaaatttcagtttaacactgagggaaagtttatacatgtgatatgaacaattgaattctttaaataatataagttaaaatcatatttaagtctatttttctgatggtttttggtaataatgtggctagatgatttgctaaattccgtaattcatttgatataaagaaccaaagacaaaaaccaaaactcccaacccaacagggccccatagaaagacattcatgccctacccataacacagctccaccagcccccatctccagctggagcacctggcggcctccacctctgagcgggagccagaacaggtgtggtgtgagcctcacctgggcctgtctcaaacacatcctctgaactcacaaaaccagagtcccccacagcaccaactcgaactttgtatgctgttcctggcattagaccctttaacccaaagaagctccgagaaccatttacaatttcttttctccattcttctttgcctatggaaattttgcaaaaacaacacatttgaatattttaagggaccagaagtcacttaatgcttcaagaaaggaaaattctttataagctaaagacaagatgtaggatgcttaggtttaccattttagattattataaatgtagtcatgtcaaacaaatcaattaaaatgacctacaggaaaatatcctcaaagaaaaatagactgggtatctagcttgcttattaattgtatatattcccattgtattaattctcctctttaatacaaaggaaggttctttatctgcaccttgccttatgaaactgttgagtttctctaaagatgtttctcaaaagaactgatacacattaattagcttaagtgaactatgggaagaattgtttttttatgattcacaagatgaatcttttagtaaacttaaatgccttccaacgtatccaattaatcgattcaacctttcccaagtaccggtttttctaaagggatcgtcatttctaaaaacatttacttgcatgataaaggcttaaacagaaagttggactctgttcaacattttgtcacaaacatttattggccacctcatttgttctatgtaagcacactgcacttaggaggggggtactggcttttcataaactgctgaaagtgaaagctgccccatctcccagtagatgtggccaggatctacgaagagtgcctgacttgagaatacatcaaacgttaaaacataatgaatgctctcccaaagtattaattttctgcggtttcttataaaattctgttgggctagtcagggcaaaatgaatactttcaagtcagtttgatttctgttacttcaagatccaatttgaaaaaaaaaccttttcttcttttctattgtacttgcaaatataattattccttcttactcttgtttatgtgttgtgggcacagaactagtttcaagtactatgatatgaaaataacatacgtaatggaacatatgccctctgttattaataacataaaaaagcaattcctagtcgtgcatataatatgtggtaggctgatggttcactataatttttttagataactcattcatttaattggatcaagttatttttcaagatgatccatagtaaattcttaagaatgtttttaatcttttaaaaaatgcatcccccaaattaaaaatcgggtaatgaaattgtttcttactgcctgctacaccatattcaacataaaagttcacatgctctggtccctcatattcccaactgatattggcataggtctcagcagctgcagcagtaagattgctgatcctgggatttactgcttgaactaaacatacaatagaaaaataaaacaaacaatcatattgcaacaccatacacacgaatataaaataagtttaaatactctgaaattgtgcaaatagaattaaatagaatttactgctaaaatttagggttcactcatgctttgctttcattacagaaaggtttttgtttcttaaattcagcactaggaaattaataatcagaaataatgacgcataatattaaaatttgtgagttctattatatgggttctgaacaatgttaactgttgtccattagatacagtcccgggaaatgtcaccgtcttcatttactaaagtgtgatggagagggggattgctgaacaatcccagggacagacgtcatcatggaatgtcagagacgccaaggtaaaacccaatactatgtggctacttttcaaacctatttgtcatctcaatgcaggtctttaaaaaatctgtgttggtgtgacagagaatgcccctttgaacagcgtttttgatctgttttaaaaaacagacttctttgagtatcactgggaaactcagggaccccaggtaagaaatccctgctttagagaatgatggatggtaagggtatgttggaagagaagctgcaaaaggaatttccagatgtgttctatcagaagttaagaaagaataaataaaaggagtaaaaactatttcatgtaacatttcctagagagcaagacaatcttacctgttaactgtttgttacaaagcattttctgaaaaatcatagtgcaacctaaatagcttcttaaaaatccaaattatggagaccagatgatgctacatgcttgctactgggtaaagacaacatctaaagtcattaaaaaatgttatttgaatacctgaggcaggcaattctatcagtcctacctcaatagcttaaactaaaaatgaaacatttacagatgtgttaatttgggtagttaaaaaagaagatcaatttattatctcacataaaatttactaggatagtcaatcagacagcatcaataggtttaccaagacactaaaattatattctaagatatgtttataaaatgtagacgctcaagacctttgttcaaataaatgtaataaaattacatttcttagaattaagaaaagaaagatattaaagcagttaaataatgcttttgacttctgaaatataattcaacaacacatgcaaattttgtatctctttgtgctaagcatggggaaacagcagagggcaaaactgattactgaattatgcagagtccttctgtggacctaattaattttagttttccgagattttcttcttataggtaaaataataggaatatgatcaatcaatgacagtaaatatgcacacatgtgtaaaacatcaatggcaacccaggaaaaacattaattttcttaaaaaattttggaatattgaaacaggaatttaatcttggagtaatatggaagatgttcaaggcagaaacataatacttctaacacaagagcatttactaacagaagagcaaaatacttctaacggaaaagcatttagtttcttcttatattttacattggtttctatgggtgctcccttctcagagtttcttctctaaactgttcattattattattttgtttctagttttattgaaatgaaatcattatctctacgagtatcgactctcctaaattcattgcagcattattcacaatagtcaagacatgaaaacaacctaaatatccattgacagatgaatggataaagaaattaccatatatatatatatttacacaatggaatattattccgactttaaaaaaaaaggaaatcctgccatttgcaacaacatggatgaacctggaggatactatgctaagtaaaataatccagacacagaaaggcaaatattgcgtgatctcacttaaatgtgtgtgaaaggaaaataaatctttgggccccagaatcactaagctaaagggaaaagtcaatctgggaactgcttaggacaaacctgcctcccattcttttcaaagtcatccctctgctcactgagataaatgcgtatctgattgcctccttcggagagtctcatcagaaactcaaaaagaatgcaaccgtttgtctctcacctacctatgacctagaaactccctgcttcgagttgtccctcctttccagaccaaaccaatgttcatctcacatgtgttgattgatgtgtcataactccctaaagtgtataaaaccaaactgtgctctggccaccttgggcacatgtcttcagggtctcctgagctatgggtatgtcacgggcatatgttctcaacctgggcaaataaactttctaaattaactgaaacctgtctcagattttcggggttcacatgtggaatctaaaaaagttgtacttagagaacgagtgtagaatagtggttgccaggggctagaggtggggtgggggttggggaaatgggagatgttggtcaaagggtacaaactttcagttataagatgaacaagttctagagatctaatgtacagcattatattactaattatagttaataataaagtattatacactggaaatttgcatttagcttattcttaaagatacccagaaaagataccacaatttcctaaggcatgctgtttagccacttttaccatagggaattcgaactctccttccttttaatccccactcatccaccttctcactcacagagcacctattttgtaccatacaagggagctgtagtgtcccctttctctgggctttcccaacggactgcttccggtgtgcctcgcccaactgtaagtcttcctctgtagataccgccagtgtagttacctacattttagctgctgaaactacaactcttatctagccacttctctgtttaaaactctgcctacaggtaaatacaaattccttagcaaagcattcatggcccttcagagctgttaccatctggccccgcccactgctccagtcccatctcagggtcttctcttttccacacactctctacaagtcagcctaagtggaccgcttggtataacccagacatccggtatgttttcaaacgccatgtgcttatgacccctaccaagactttacacactgcaactccctgactcatctgacaaaaataaaacaaaaactgggcttcaaggcccagttcaatattattttctttgtgaagcttttcctgatcctgcttggcaaaaaaaatggttcacacctctatattcagataacattttgctccaatttctagtttagcgtcaatttattactctttctatacgttggtcttacctgccagatttcaagcatgtcaaggccagggtttgtcttactgtctttatacacagcttcttaaacaaacacgggtgcattttatgtgccagagagacattcactgttgaactgattgaaacttctatgcttctagatgtcttgttttgttttcgtataggccaaaaaaggaattttattttttatttactggttctttagtaaaataatgtagtgagagtcagatcacagaagggattcaccactagctgatcctcaatgctcttctctgctcactcctaattggttgaccatagtaggctgcaagttaggtcaagaatgcagattcctgctttgccagttagtttatccctgtttctgtattccaactaattaccctataaaagtattttgatgcttggtcctcagagcgccagattacatgcaatggatatggcattgtggatcatcagcaatactgggaacataaatctttttgagcctgcacatttttggttcatttctatacatgccttcacagtctacttcctagaattccagaccctgaaatcatttatttatttatttatttatgaaatggagtctcgttctgtcgcccaggctggggtgcagtggtgcaatcttggctcagtgcagcctccagctcactgcagcctctgcctcctgggttaaaacaattctcctgcctccgcctcccgggcagctaggactacaggtgtgtactaccacgcctggctaattttggtatttttagtagagatggggtttcaccatgttggccaggctggtctcgaattcctgacctcaagtgatctgcctgcctcagcttcccaaagtgctgggattacaggcatgagccaccacacccagcctcatttaaagagacatagaaattgaaaaaatatgccaatcaactataattcctacacaaatattgagagctttaatccaacaaagaaaaggacaaaaataaatgactcaaaggtctcgcgtatgtaattatcttgaggagaatggtaagaagaagggttagtatggcatcatatagttaattgaattatcctgggttttccttcaggtttataatccttttgtaattatacatttgaaaacttaggtttcattaacatctcttaaaatctgtaagaaagtttaaaaatgtaaactcagatgcatttcttttcccctctttgaccagaaatgaattaaaaccacttttcatgaaatcataattcataataaaatcttatgagatgttgatttttttttttttttttttttgagatggagttttgctcgttgcccaggctggagtgcaatggtgcaatctcagctcactgcaacctctacctcctgagttcaaacagttttcctgcctcagcctcctgagtagctgggattacaggcgcccaacaacacgcccagctaatttttatatttttagtagagatggggtttcatcatgctggccaggctggtcttgaactcctgacctcacgtgatctgcccgcctcagcctcccaaactgttgggattacaggtgtgagccaccacgcccggccatattgatgcttctatagctaaggatatcacatgtttcctctttattcatctcttatttattccctattgtcctgatttaaataaaaatgtaaaagatacatttaaaaaattaaaatttgggaggatagtggagaacttcaatttttctcctgtcacagagcagttaaattccatatggagaagggaaatagtgaagaggatagaattcattttcagattgaaaaaaagaagtatttttaaggaaggaaaacccaggatcacaaattatgcttgagcagtttaaagtcttactggcaaaatatcctcttatgtaagccatacttaactactgctatactattaaaataaaccatattaaaattaaggtcagagttagcttttttcccccttatttaaacgctattcttttcttatctaagatccatcagattttaatactgggggcttaatgaactttcagacactccatttttgcttgtctctctaatcataagtagctcacaattcaaattagtaacatcaaatggtaaaaccaaaactctttaaatatagaatttagttttaatttattaaaaacagaggggtgatgtttttccagtggagtgcatatctacttctaacgtgacaagtccactgagaattcagacttgcttcacagacagtcctgctgaagcacaatttctctgctatcagctctaggcacagccacagtgacatgtccactgcataggaaacaaggccaggcttttagtgaaatgctccaattgaagttataaagcaatatattattgtaaaactactaatgattttaattgatatctaattatcataggaaggaagtatacaaataaatagaagtaagtttacatcgctctgtgatatagaaattttgaatttttacaacttcgtcaagtctaaaaacacaaatataatactcttaagattactgaaaatggctacagtccttattcaataactccaaaatctatctgatcgatattttgtaatttaccaaagctctgaatataagcaaatttctaagcaaatagaataaatctatcaagtctaagctcacaggagttgaataacatagggcaaagcacatttttctcttggtcttccttttcttcattcctgtttatactcacctgatgtgcgaaagcccctgaccatgggcatgccacgtgaaaacagtgcccagtggcaggtactccactgctctctaaaaagctgactggtcaaccagcagccaggggtcaaagactggggcatctttggcattgccactaatggaagacatattacaacttattcaagcaccattctcccaacaaatctttctgacccagagagctgtcagaaataaaggagaacaaaatccattgtggattgttggctattactcaggaggaagagacttaggcagttgggtgaagacaggatgggtgggataacacatttgagaagagcatatgggtcacctggaagactcacttgcaggggaccctaagctcggggagacttagtcccaaaccagttggagggcattgctacgctgtaattccaaatggacggttttgtgcaatggcagccgagtgtacactgtgtctacaaggagagcagctaaatcagaatagaacaggaagcttggttgatctgatttctaccaggctgttttcatcacagggctaatatttctgaaccccaaataatgtggcatggccatatagaggatctgtgacaaatacacagttttggtcctgtctgatccagccaaaatcatagtattagaagctaagattaggatttgtaccagggataagtctcaagaaaaaatgttttgagaattcaatatgtggctttctacttgtaaagaaaggactagaaattaattttaaagccaagattggatgagatcttctcttcttttggtggttcaaagcatattttctctgttttacccatgctgcacttccccatgtttcacattgcaaatttcacacatgtataaagtcatgcagatgaattattttacctttgcctgcacctacatcaggtggaagaataccagctttaatgaagggaaacagaaataggacactatatagttagatgtaacacacccatgagcatgtatagcgatacaaaaacacttattaaaatgctaaagcatgcaagaagaatgaagtgtaccacatcaggtataggggacaaagatatgttggtgtccccaaacttatctagtattcaaatccagtaccaacattttatcaggatacccagtttgaatacccagtattcaaacacattacttaaggtgcattattcatacttgttgattatgtatgaaggcttaggatatttcaaaccaatttttggatagaaattgtcaattttttatgctatcaaagatagtcaaatgaataatccttaagcaactctacaatttagagacatgcaaaactagaaaaccttttataatatttttgataattttcattgaatctcaagatttcagaataactttttaaagtatgaaaagaagtgttaattccttttctaaatactataatgggctattttgctttctttgtacataccaaaatgcaaaatcttttgctcaaacacaaaataaatgcactctttaataactgtttcgatttccttgctagaaaatgtaaattgatatgtgaactagaaaattttttccagtaaatcaggaccagaactcgaattacatatatttgtgtgtatatagatgtgtatgtctgtgtatgcatatgtgtgtattatgtgtatgtgtacatatgtatgtttgtgcatgaatatatataatatataaagttgtaaacaggaaacaacattcccctgaacttcaaattcaagtgtggcaaatattatgcttactcactcccacactaagattttaatgtaagtttaagaaagtttcacatggagttgaaaaatatcagtccaatatgaactaaatagctgattatatatcagaatgagaaattacaaataagtgtttgcgttaatcaggtaagacagacgttccatagcaagaaggaaaaagcataaacttaaagatttttatttcatgatgcttataattatatggattttatacatacccatcttaccttcatccacagttgttactgcttcctctgtaatttgacttcctgatcctgctgatgtttgtgcatagaaataaaacttatatcgagtgctgaaatttaaattttttaaagtccaccgtgtcttgttggcaggaattttcaaatctaccagagggcctaattcatgtgtgctgttaactgtcaataagaaataatgaacaagtgcattctccattaactgctataggaatactattataaataaatacgtcaactaaaaatgttcaacctggcttacattgacttttataatcccactcactctttccccagcataactaagtgataaccttttaacagctcctatgctatgttctatcatatcgtatcatatcatatcatatcatatatcacaagggggtagtatgttctctattggctaataaactagaagaatgttgtggttgaatcacaatagaattttttcccctgtgttcttgcaggtggagttgtattgttaaataaccccaaacatttttcttcagaggacttttgccaaaggaaccattttctatttgtagaaaatgcatatgtgatttaatgacaggactcacctaaaccccactcctaaaggtctgtattattctacagattacttaatttttaataacatagacatcatttttctttaaaaagtaagatttgaagttctttctgaaacaacacttgaagttatatgtatatattctacagatataaagaaaaactagcttgtattttttgataacagttaagttaaacaccacatgttctcactcataggtgaaagctaaaaaaagttcatgtcacagaagtaaaaagtagaacacagcatcccagaaataaaggaaggacagagggaaggcgagatagggagatatcagttaaagggaaggctgggcgcagtggctcacgcctgtaatcccagcactttgggaggctgaggtgggcagatcacgaggtcaggagatcaagaccatcctggctaacatggtgaaaccccgtctctactaaaaatacaaaaaatttgccgggcatggtggtgggcgtctgtagtcccagctactcgggaggctgacggaggagaatggtgtgaactcgggagatggagcttgcagtgagccaagatctcaccactgcactccagcctgggtgacagagcgagactccatctcaaatatatatatatatatatatatatatatatatatatgtatatacgtgtatatatatacgtgtatatatatatacacgtatatatatatatacgtgtgtatatatatatatgatacaaaatgatagctagatacaaagactaagttctggtgttccttacacagctagagggaggatattaaatgtttccaacacaaataaatgataaatatttgagaagatgaatatgcgaattcccctgatctgatcactatatgtatcgaaacatcactacgtaccccatgaggaggtataattatttgtcaattaaaataataaataaaataaaaaaacatatttccccttctcttcctcccaacagcttacttggctgatactttaaggtgtactctgtcaaaatgccattcgggtggctcggtggatcccattccaaagtgagagagtccagtgttggattcacaatcttcaaagacgagggagcactggggacttacagtgagaacttacagtcaacacaaagatttctgaatgtttcaacatgtattaaattgacatttcaccgtgctcgcacgattcaaggttttgagtttcagtaactcattcctgattcagctgaaaatacattagtacaaacctgtgacaggcacccatttagttattctcttcctttttctctcttgtcatttacatttatatttaataaaaccatcctctcaaaacacataatgactttgcctttagatggactcaaacctaatattttaaaaagaggcagtacttgtttgacgcatgaatggtgtcttaatagaagcaaactagctaccaagtgaaactattctaactggatctgagtggaagcagctgtgttctggaccattaaggactgttttctctaacaaaccaggtgtctccaaacagtcagaatgccctgcctgctgggctttgggccagcatgcccaggtgcagaaacgttcttatcctgagagctgacagctgcccaggatctggtggtgaatggacaaaagcccaaccttggcacacccccagccctggggaaggcccgaggggtctcaggttctctgtggcagaggctggcaaatcaccagaggaaacatgtctgctcatcttttattcacttcctcatgaggatgatggctggtggcagctctctctcacaatggttacctcccctaccactgcccctggaaactaactaatggaaccactctccctattgtcactctagccaaaaaccagagtcaacctgaacttccctatctgcctcatttccaccctctcctcagacactaactccacttccttaatctaaatcatatccatttcttcctatccccatcttctttgtcatttccctgctttaggcccctagatgtctttgtctggtcctaaaaccatgcctggcacatagttctaggcttctaagcttccccaacccaataagtggttctttactttaggggatcacagacccttttgagaatctgatgacagccataaacactccctggaaaaatatacatttatcttgcatacaattttaggaggctcatggagctcattaaacccattcattgtctccctaaggactacagtccccagcttgtgaaaacatcgaggaggaagagccctgactctctaagggacagtgagattgacgacaaaaacttacaatgagatgggagctgggatgcagggtggttctcagaggctgctgggcagctgcctgcatcatgaatctttcaatcagcagccagggtggggtccatcttctgtgaacttcttttatcaaaaagagctaagcaagctacagaagctatctggccattgtcatagtggcatattgttgcaaaatttaaaataggtaaaacccattttatttccttttcaaatcctcatcctttttactacatgggcccctctttccctcacccacaaggctcccttgtccctgtgtccaaattccttctcccctgactcctggatcaatatatatttggtccttccttactctctcccttgcagttgcccatatctgcaatgacttttccctcctcttcccaatccacttggtcaagacttgcaaccttctaactcggttcaactttctaataaattagaaaagagcactaagaaagaaactatagaagtaaactataacttatagaaatattttcctttccaggtgtttttgttaggttatctaatttggttctcatgcttttcagatgaggctactgacattcagagaagttatggaacctctttcaggtcagaaagttaatgatccaaataaatgtcaaagtaacaaggtttcagacagtgtgtgtggagaaaaattttaagtcacgggagagggcatttcagagcagcattttgggttctgaagccttctatgtacacttaggcccacatatgatctgacattttggtagctttgtgtgtgctgtattcatctatagaaatttcaatcacatttggcttccagaatatactttgatcagtagcccttctgtcaggcaaaacctctcaggccatgccatatgttcctgagatcttagagacacgtccattccatacctccttctggagtattaaagactctgtcagggctggctgggccctcccctttcccattgaccactcggacattcagtgtgtagtggctaaagggctctagccccggcaacatgccatgagtcttgctgccttggaaggtgaggatctttttctcaatgtgacgtctgtttcttttagatgaactctgggtcttccaatagtaaatctgaaacagcaagaacgaaagtcaggaatgcagaaaggagcaaacaagattccttatgctcacaaaattgaaactgttgtttttccagaaaattccgttggtatattttagaagaaaattactagcaaaactgatggatattgattctgaggcaagaggaatagaagcccatagatcatgagggaaattaaattacagccacatgacaaagctgggctacactactttgtcgtaggagtctaaggaaaatgaaaacagcacgagacccatgtggttttctctagaacatgaggcaaatggaggacaataggatttaagtcttttacttgtataaaatattctaaaaataaaaattactgcccaatgtttacatatttttccagaattaatacatgttcacgtacaacctatcatgtagtgattgtaaacaccacagtgaggcttttattactgttattcatatggtgcagatgaacgtgtgggctactaagtgactttcacagccacagaggtatcaagagccacaggggatcctccactgaaagtctagaatttttccactaaatcaaactgtatcacttagtttaaaatacttttttttgtattcgattgcaggcacaggttttggagagatggataagaaagtactgattaattttggtcacaaatccagaattgttgtttactaagtcttcttaaattcttatgaatttaaaggcattttcaggagaagtcaacatttacatggaatctggcaatgctagggggaaaaaaaaaaagttgaatgtgatgtagtacaaaaagtgacctctaggggtcaggcttaacaaatcaaagtagtgactgtacgcttggctgcctatcagtaaaaaatatgaaatcagtgcctctcaagaacaaagataatggatatttatctttcagtacttctcaagaacaaagataatggatatttataagaatgacctagctaagagtatatggtcttaaagtatattctgaattattttaaaaatgcctaaatgattatcaggataattttgtgtgttcaacacatgtggtccatattgctttaaagctagctagagttggtaatattctaggtctttaaaaaattaattttccccattttgtatacatacttagttggtagaatgttagatcatcagtgggaaaaatggagaaaactttttttttttttaattttggatgcagtgagatttcaagtcaactctggcagtggctacctgaggcaatgagcgaaatgaactcttcagtccacaagttcacaaagcaatgaaacaaataagccccacctcctgtggtatgcatgacaagtggcattcgctgcagcccttactaaataaagccacaaaaggtcccctttcacttgcccgatagccttgtaggtgtcctcggatgcttttcagaggtactgggtcccagtgcacctcggctaaggtactgttcaccacattcacacgcacgttcccaggagccaccattgggactaggaaaaggacagggaagtggtagaagtatcaatgttatttttaatttcatccataaatatgactctctctaataattttggcttgaagcatactgcagacctattctatggattattaaggcttgaacacagattttggggtatctgtttgactttgtgagagattttttttttttaagagatggcatcttgctatgttgcccaggctagactcaaattccttgactcaagggatcctcccaccatcagtgagtaggaaaacacgattttttaaaaagtacaattgacccttgaacaacacgggtttgaactgcatgggtccacttacacttggatttttttttccccccaaaatacagtcagccctctacatctgcaggttctgcatctacagccaaagaagatggaaaacacagtattcctgggtgcaaaacccacggacatggagggctgatatttcatataggagggttccatagggctatctgtgggacttgagtatttgcagatttgggtatccaaggcagggcatcctggaaccaatcccctgtggataccaagggacaactatactgcaatcaccttgaacgttctgaacttctctttcttacacagcaggctgtttaaattcagagaagtcgtgcaaaataattgccacctccctcccttgcaacctgagcaaggagaaatggccttggcttgcaccttggtaagtctgttttgctggggaaaagtaggaaatggcatcacttacggtcttctccagaatgtcccatgactacagctggctcgggggcaaaccccatgtcattcagggcctgaactttgatcaggtatggaacaaaggttggcgtgcctgagacaatatatttggatacatttgccacaaccacagatgtccattcatcatcaccatctttctggcgccagctaactttgtactgaaggcctggcccattagattcgaaaccattcaagggctacaaggaaagccaaataaccagagcttataacacaaatcaactgcacaatcttttacaggaacagcaaattcaattcccagacctacagaaagtgatcattgaaatactaaaacacaagctattaaccattttctccagggaccttctatcaattgtgcatttgcaatgagattcaaagcttgtttgggatcaacatttcaaaggttgtaaactactatcttgatgcaataaatatcacataaacctttcaaactctggctctaccgtcaaggatggtgattctttagacatttcggtcacatagaatcctttttatattcctgtttgtgcaatagtacatcattgtccattttatttgcagatggaaacttagactgttttcctctttattaaaaaaaggctagcctgtcattctgttgtttctacatgtttgtataaatataagtatgtacatatatgtatacatgtctaagtatgcatgtatggctctaaaataggttttgaattatgagtaaatatatgttaattttccaaatccagaaaacacagataagctttccccactaaagaagttgactgctgggaatggcttggtgcatgtcttccaggtggctctttttttttctttttggagatggaatcttgctctgtcacccaggctggagtgcagtggtgtaatctcggcgcactgcaacctccgcctcctgggttcaagcgattctcctgcctcagcctcctgagtagctgggattacaggcatgcagcactacacccggctaatttttgtatttttagtagagacggggtttcaccatgttggtcaggctggtctcaaactcctgacctcatgatctgcccgcctcggcctcccaaagtgctgggattataggcgtgagctactggccccaggtggttctttatgataacactagctagcatttttttgagcatgtgtatatgctaggcactgttctaggtgctttatatgtattagctcctttaatactgtgaaattggttctattattactcccatcatacagctgcctaacagacatgttaaacaactggcctaagatcacagagttagtggcagagctgggatttgcaccaaatcattttgactccagagctcaagcttttagcaactatataatactgcctcttaagtaaagatatatatgtatctttatatatatatatatattttttttccccagaaataggtgaaatgagattctaatgtagatattattttcaaacaacttttttttcactctaaaaaatagcgaataaatttgaaggcatcatagctcaccttccacgtaatcaccaaattatcaggctctgatcccagtccttccacagctgtggggtttttatctggttctggaagttaagcagccacacatgtgtaagctttggccttttgcgaagagtggaaaacttttttattatatttcgtaccctagaagtcccgctttcccgctttacctgaggctttcgtcaaatactgctcagacgcctcgctgggcaagctcttcccaatgctgttcactgccatcacgcggaaggagtagttcacgtaaggagacagcttcagctgggctgtggtctgtgttccagaaacttcagtttggtggtgccacagccctggcttgtgcattgcatcttcatattcgatgatgaattctggtcacgacacacacacaccaaacccaagaccgtgaattcagtcaactcaggggtagctgccagcaataactaacagggcaacccaacacaagcaaccaaacatgaattattttactttcaagaaaaatgccattaaaatattttgatttcagagttgtcattatcctcaacatataaacacacatgataacattttagtggaaaaatggcatctcactgtatttaatttaatttctcctattacaaaaaaaatttgaccaccttttcatatatttaaactttttagggatatatggattaattctaaacagttttagattttaccaaatctggtattctttctctagcatgctgaatttagttacttaaaactgtttagaattaatccatatatccctaaaaagtttaaatatatgaaaagatgatcaaatttttttcataataggataaattaaatatagtgagtgccattttccactaaacatattggcaataatcaaaggtttaacacacttcgttgactatgacacaaggaatcaagcattctctgactttgtaggaagtgtaagttgggacaacttctatataagacagtttagaaaatctgtcaatatttaaggcgcatactaaatttcacttctggcaatttattttgaataaatgggctcacacaaatggctcaaacacacatgagaaataatttacattgtagtattatttgcaattgaaacaacctaattgcaaacaacctaaacatccatcaacaggacactgactaaacaaattacactaggtccacacaatggaatactctgaagctgttaaaaatgactgtcagccaagtgcggtggctcacacctgtaatctcagcactttgggagacccaggtggatggagtccaggagtctgagacaacctgggcaacctagcaaaaccccgtctctacagaaagttaactgggtgtggtggcgtgcacctatagttccagctatgggggaggctgagctaggaggatcacctgagcccagaaagtcaaggctgcagtgaaccatgatcaagccactgcactccagcctggacagagtgaaaccctgtctcaaaaaagagagagagagaggaaaaaaaaaaaaaaagaatagggctgttccatacgtactgaaatggaatgatttctaaagtgtattattaagtgaaaccaagcagccaagcagggtatagaatcgtgtgtgctggatactatgcttgtgtaaatgtaaaacgaaattactacaacaaataaacagacatattcacttgcatataaatgcatattacctctcagagaatataaacctataacattggtgtggccagaggagctgggagacaggggcgggaggaagacatatttttcagtgcataccctctgcgtccactaaaattctgtggtgtgtacacactttacccttgtaaaataataggtatttggatattcactgattgcctactatgtgccaggtaccatgatatgcactataaacacaaagatgaactaaaaatattatatgtcttgcagtggttcaaaactaagtccttggagttctcctttcaatccacattcatctttggatgatctccagtcctataaatggatgactttcatgtttacatctgtagcccagacctcttccctgaactgcagactcaggaagtccaactgtctgctcgacaattccacttggttgtccatgacagcatctcaaactggatagtaccaaaactaattctaatcttcctctccaattgatagtgacagcccaggtcaaaatctggaatccttcttatttccctacttcttccacactctctgtagtacaatggcctgtaccattaaaatatatccaaaatctgaccatttctcagcctattccaggccaccctcatctcttgtgtgagttatcacataacctcctaactcagtagttcccaaactttctcggttcatggtgtacttagtgtctccataatttatttttcatggctcccttaggccaaaagaattacctaatgttttcaggtattaagtagctaggttcatacatctttatatgtatttatatcttaaataaatgtaagcaatttaattttaaacaattttaaatctatttatatcttaacattgtaaagcttctcttatataagttctcaaaccttgtaaacagattggacaccaccttccacatttcctattccccactgatttccatgtggcacttgctttttatcacagcaaacgctttgcagagatataacattatcacaaaatgacatgggatataaagttgaacctgtaatctgcctcaagctaatttcatgtgacgtttgacagatgtcactgtgtttttttaatatcagaatttaaaagttaaaactttaaaattattccaaggaaggtaccctgtgaattcactgaagtaccacagggcacttcagtgcacagtttgggaaccatggtcttacccagtctgtctgcttcccctcttgttcttctatacactattttcaatagacaagccagagttattcattcatcactcctctgttaaaaccctccaagggctttcccatcttcacagtggcctacaggaccttgcacaattcccactctacacacccaccaccgaactcttcagctctttgaccttctctccgccctcactttccctttttcatttcactgcagccacactggcatcctagcagacatgccctgtcttagggcctttgctcttttcctttgctcttgctggaaagttcttcccctagacaactgcatagtgtgctcactgacctccctcccctgtcttgattgacacattcaaatgttcttttagtgtggcctttcctattcacactattcacaattatacccctagctccacatgtctttctgctgatttgttttttgcatgccctaaacacatataaacacagtcatatgtattaatagatatatatgagtttgagtcctctagggagcaaaggctaagacagaattagaagtgcaagaggtggccgggcgcagtggctcacgcctgtaatcccagcactttgggaggccgaggcgggtggatcacgaggtcgggagattgagaccattctggctagtacggcaaaaccccatctctactaaaaatacaaaaaaaaaagtagccgggtgtggtggcgggcgcctgtagtcccagctactcgggaagctgaggcaggagaatggcgtgaacccgggaggcagagcttgcagtgagccgagatcgcgccactgcactccagcctgggcaacaaagcgagactccgtctcaaaaaaaaaagaagtgcaagaggtctatttgggaaaatgtccatggaagaaaaaagggagaggaagcaaggaagcctgaaggagggaagaccttcagaccacaatgctggtctgacatctgtaacaggaagtgggggagggaaggaggagtgagtagaagaagcctcagactacagtatagtatagctctgggatagtctcagccaggtcaaccaggagcccagagtacagtctacacaggaggagttctgcattaggcacgtgtgacttctgggacctttgctgtgcccagtcactggagcaccccaaggagcatggcctcacgtgaactctgcagtggagccttagagaaggagaagcagatggaggctgtgggttaacactccttacagcaggttcgcccttgaaggtagatctgagtcctctgtgtgtgtgtgtgtgtgtgtatatatacatatgtttacatgcagatataatgaaattatgcttaataatgtattattaattttatcttatttatatcctcatctaaaatataagctccattaccacagagatttttgactattttgttttagaacaatgtctggcacacagtaggcactcaaaaatatctgttgaatgaatgagtaaatgaatgaaagagtagaaatgccttgaaatctaatggtattattttaatataggaaaaaagagtctccaagccatctaaccagctaactctggctaatgtacccaatgagctagaagactgggcctggatgaatttgtgttctgatcaaggacattgaacactcaagtagggaaaagagcaccattaaacaacacaagatagaggaggggcttttgttaaattttagtggaaatattctactttaccaggaggtgcaataaatcaacacacctatcatttcagaatcatcttaggtagtcatcagaaaggaattgtcttcctgcggtatatgcctgaaggtaataatgtatttcaggcatgtgacctgattgtgtctgcctcttaagtatctctttggttttacaattcaacttcgaagcttacctatagtctaattttattatgctcttctagtatccttatgacattgtccttccttatcttatttcctaggccctaggcttgtgtcaccaacgtgagaagctcacattgttgaatgggcaactttgtagcagggactaatggaaagaaagagacctaggttggaagttaaggtagaacctgttatctacgcccagttctgttaccaacagggggttgaaaagttactttactcatcaagtatcagtttcctaataggaagacagagctattcagcacttgctcctcctaacattttctcccagaagaaatgggcaaaataaacaactaacttaaggtgtatcttcctacatggtagatatttaaagtgatttttatggatcttaaacacaaatgacagtgtatttgattagtcaacatcttcagcaattaaggggtgtcctattctagaaggtgtaaccaggaatagtttcagctctgaagagaggaaggacataaataaatatttttattctatcagtaatgaagcagagaatcccagtaaatacctttgtgaggaaattcagctgactgttacaaagtgcttcaaacatggccatttagttgatcggaaatagagcaaataataccacatacttgtaatggggctattgttgtcatcgcctggggtccatgacagctgaacacttttgtcaagttgatctgtcagttctaagtcaaagggaggatttgggacatctgtagaccaaacatacacacatcatggtcacgcatccatctttaagaggctctcctttactcgtgatactattcacagaggggacatcttaaagacacagcacacttgatagtcaatgagcatgcaactgaaaggaaatgtgcacagctgaggctgctgggaacacacgaacacacacaagataacccatcaatgagttctgctcacttgtttttcaaaggaaacgaaagcatttgtaaccaaacccagtgaagcagacacatgtggttcatcagcactctcagcgtttcttctcataaacatgaatgggcacaaacatgaaaaataataagcttaatttctaatacatgggaaatagagaaagcaactgctgaaaaaagaaatacaggcaaataaaaggtgctgtttaaagaaaattcaaatgttctttctaaaaaaaatgctgaataacagattttggggctctgaaagaatatttatatttgcgaaagaatgctgaaatagatgctatggaggtagccctcagcatgcataagtgtgtttactcccagaggacaacagtgtatagacagacacatgtcgagatgaaggtgtcctagaagcatgtctgcctcttctaatggtgcttctgagatccagagagttactgttccccccaggcctttatttgaccttgctcctaggagtatctctggctcttaggggaccagagaccatacaaatatatgtgcttttttttcttatcagtcataaagcagtaaatgtctacaaagcacaggttttatattggataattagacacaatattaataatattgtgcaaaatcagctgagatgccaaaaattgatttttgtattgacgtactgaataaagatgaaggttctctaaataaaaagatttctggaaatgatttctgacttattttccagattctaaaaagccacacaacataaatgtgcccctccttttggtctttcttgagtgatttgtcttttgttaacacatggtgagtcggttttctctgatataaaagttaaatgttgttctaaacatctatttttccccatatacatttcttgaaaatggaatcccaaaacaagatttttcccaaacaacttttaataaattgagatgaaagcctaatttgtagaatgatattagaaatagctttttcattctgtaaaatgtggatgatggcttttgaaaaagcactatgctactttaaaaggaaattgcatcaaagagggacttttatcaaacgaagtgattttataatagcacatgaactatttagaaagaactggcaacgaacttggtgaaaaatctgtggttatgatgaagaaatgattcattgtcagtaaatgggtgacacaacataacaactgacagagaccttttccttaagaaacacaattatgtgacatagaaaagaaagttatgaatactttctgcaaatgtgaaattgtttgacagaaaacagagaaagaagactcatattagtttaccgtaaacgggagctggagttggagtaggagctagaaaggacattaatataaaggattttaatcaaaattagtaatggaaagatacaagatagcacaagatgacaaagactgtacattattcaaggttataaaattaagccctatgcttagctgtgagacacagcattgataaacatgcagtaacaatttaggaaaaaaaaccttcaattttagatacaagtagatcatttctccttattttattacaaaaaaggttactaatgtgcatatccaccatttcacccagtgctgctacacagtctatttatactgaaattattgcctccaaggcatctttcaaagaagaaaaacatgggtatgaactcacccatgcatattaacaagcaaatatttgatatttataatttttatcttattttttcttttcaaccaaatgcagggaagccagttgtgctatttttgttttcgttcttaccaacaacgctaagcacagcgctggcggagacgctgtccagagtggtgttggccacacacgtgtaggtcccgctgtcatcgtcactgacatcagctaccactagatgatccttgtcaacagtgaacctgtggatagaatgcattcagagcagctgaaatggacatgcagccgtaccctataattgcttcactggcaggaaaaaaactgtaaatttgataaaggagaaagatggtaaacactttcaaaagttagagcaaaatacatatcactttaagaatgattaaagttgaaaaacaatgagaatcaattagaatattgggttagaagggatatgtcctctggcacagtatttttcaaccaggcctctagagcacgggtccccaaaccctgggccaagaactgggtactgtcctgttaggaactgggctgcagaggggaccgctgctctagagggtgtggtaggagtttccttaggccccaggggaatggggcgagtgaagctgagctccgcctcctgtcagattagtggcagcattagattctcacaggaaggtgaaccctattgtgaactgtgcaagtgagagatctagatctagactgtgctctcctatgacaatctaatgcctgatgatctgtcactgtatatattacatgtaataatatatatatgtatatacatattacaacataataataatagaaataaagtgcacagtaaatgtaatgtgcttgaatcatcctgaagccattgtgcccccaccctgtccgtggaaaaactgtcttccatgaaaccagtccctggtgccaaaaaggttggggaccactgctctagagggagaggaaggagcttccttaagttcccaggggaaggaggcgaagaatagttccagcattagccttactaaagggctttactaaggcttttgctgccaagaaacattggaaaaccactcattcagttcaatttctatcaaagtatatattttaaatactttattatttactgcagaaaatcatgtcattttcttacatgtataaactctcataggagaaattaaatgcaaagaataataatttgctttatcactagaaacaggaagatttagatgaacaatctctctaagacttttctagagggaacttgtgggcatgaaaaattgctcagtagatcaaaaaattaatgtatagagaattagtgtattattttaatgaaactgcctaagtcataaactgtcttctcagttaatttccaagtaaaagcttcagccaccttaacctgatggtcatttctttatgtttccttttaatcttaaagacagggtctcactctgtcacccaggctggagtgcagtggtacagtcatggctcactggagtctcaaccttctgggcccaggtaattctcccacctcagcctcccaggtagctgggaccacaggtgtgagaccaccacaccttttcatctttatcaactcaacaaataaaattgactagttcaagcataaaattagatggagactctaggcacataaaagagaaggccacagagttcttccagggtcattgacaagcaacagggcaatatttaggcaccacaattttaggtcagctgtaggtgaaccacacaaatgatttcgaccagaatacagcattccttctaatagagagtgaggcctatagccactttgctaaaactaacacatatctactctgtactactatgtcaaattgagggtctcatctggaaaatgccatgacctttcttccattcttaatgaaatctgcagcatgcttgggctcttttaaatgctctacctgtttttgtttttccttcccctttcactggctttaggtaaaatcaaaagaaaaactccctatccaaataaaaacgagtgtcttaaaatactgacaaggatttgagcagtctttggtgattaaagaggtcatatttctgcttatttgtagaaaggtaatgaaaacatctgttgagacttcgctgttcaaggtataaaacaatggatgctgtccaggcctgagggttttttcccatcctgaattacacaagagaccagcacgcaaagatagacaaacattctcagggtcctatttcaatcacctgataccttcttgggtgcatatattttacagtagggagaaaatgcttatctctctattttggagacagcagacttcagaaactaaaaacatcaccataattgactacatagtagacctttagttcaagaatagcttaaagaaagaatgaagagaaagtaaagaaatcgtcttcaaatacctttcatcactgggcagttccctgttgtccttcagccacaggacagtgagggataaggtgtgatcatgtttcactttgcattcaaaggacaccatgctccctctttgcacaactgcatattcgggctgtttaacgatccatgtaggatctgaaatgtagagtcatcgttatccatttggcaaagctggagaatttgttcaaagtcatttaaaaattaaacacattacctctgccttacctttgatttctaagtgaacttcattcttcgccatccctaatttattccttgcaacacacgtataagttcctgtactgtccttttgggccacaggaatttccaaagttccattttcatgtaaaacataaatatcttcatgaagagcacttcctttagctcctttaaaccttcattacagaaattatcacaatgagaataaaaacacattatattttgaagtcagacataaaatgccatgttcaaggtcaacatgaccatgatgaatgtgaaagttgcaaggctagaaggattgtacttttgaaagtatcaataggaaaataaccagggaagaaaaaaaggcatgtatgtcagagaggagaagtgaaacggatgaaacaaagtgagtgtgaatctgttaccttcactaggaaaatcatctgcataagcatccatttttcttctctggggttaaggtaggggccaagggaaattttcctttaatcttaaccctgcatatattctgacctcagtagttggaacttagcacagcatctaggacctgacagatgatcagtaaagaatgttccagttttctttcattcattccttctgagccattgctcatccatcctagccttgtctctttcagctaaagtaaacaagctaggaggaggtagaggacttaaacctcgggtggcatatgaaaggggatggtctgaagtggggagtaaaagaacatgggagagcttggctggatccaagtcaggaagacctggtgcaacaagtactcaagagaaacaatggtaagaacaaattctgctttggagcttatagaacccccccactataccacagaatattttattatcaaggaatatcccctaactagtccctccagccactactcacaaaatcccaggggatgtccatggcattgtgaaatacagcagccttaaatttaaaaaaaaatcatttacatgtagatctgtgcttgatagagtgtgctgctaaatagattatacacatgaaagtatttaacacagagccagtagttaataaatatttgtgaaataatgaatgaatttaataattaacagtgtaggccaagcacagtggctcatacctataatcccagcactttgggaggctgaggcgggcggataatctgaggttacgagtttgagattagcctggccaacatggtgaaaccctaaaaatacaaaaaattagccaggtgtggtggtaggcggctgtaggcccagatactctagaggctgaggcaggagatatgcttgaacccaggaggcagaggctgcagtgagctgtgattgtgccactgcactccagcctgggtaatgaagtgagactctgtctcacaagaaaaaaaaatatattaacagtgtaatggattgtgtggtgcctttccctgtttgttttttgaataaaacccaacatatttagaatatgaagcctttagcaaacattttaagtattgaaaaacacacagagctgctacttaccactcgatggttgggagaggagacccaaagaaggcacagtctagtaaagcaggcctgtttgcaatgacctggtagagtgtgtttgcaggtgtgaggattcgtggtggctcagctacaaatatttttaaaaggtaaagtaaatattagaatacattttaggactatcgtttatttattgtattttgttttaaggtcattaaagtttatggtaaagcacaagcaatctatctctctccttatgttctctatcaggcataatgctgccagtcactcaaggcagaaaaatacatttttcctccctctacctcctgccctactacttgctcagacatcattttggttgttgatttactgtgagtccactgcagtcagggaatgagacttttgtcttatccccagcacagtgtctggcacaaaaataacagccaagtatatttttgttgaatgactcactcatcataaccctagtgggtaggaacggtggggaacacataagctggcagaaaaaagcagagtgatgagtgtgatggctgaataaatggaaccacagcaacaaaaacaaaaatagacaaatgggattacaccagactaaaaagcttgcacagccaaagagatagtcaacaaagtgaagaaacaacctatggaaggggagaaaacatttgcaaaccatgtatctggtaaggggttaataccaaaatatataaagaactcaaataattcaatagtaagaaaatgaataacctggttaaaaatgggcaaggcattggactagacagttctcaaaagaagatatacaaacagccaacaggtatatgggaaaatgcccaattatcaccaatcgccagataaatgtaaattaaaaccacaatgagatattatatcacacttattagaatggctattatcaaaaagaggagatctaagtgttggcaagaatgtagagaaaaggggacacttaaacattgtgggagggaatataagttagtacagccattatggaaaatactataaagattatttatactgtttatactcaaaacattaaaaatacaactaccatatgatccaacaatgccattaatgggtatatatccaaaggaaatgaaatcagtatgtcgagatatttgaactcccttgttcattgcagtattattcacaatagccaagatatggaatcaacctaagtgcccaccaatgaatgaatggaataaagaaactgtggcatatacacacaatggaatactatccagccttaaaaaagaaggaaattctatcatttccttcatgtcgttcatgtcatgaccacatggatgaacctggaggatgttgtgttaagtgcaacaggccagatacagaaagacaaacttggcatgatctcccttaaatgtaaaatctaaaaatgctgaactcataaaagtagagatgaaaaaggaatcagcagccaaaagtgctttctcaacatccaccaatatcttaactgcttagctcttcataggattagtgaccttcatttcaagcatgaaaggaaaataccaagtattggttggcttactgatggtaattttgtttgaaaaggaagcatactaattttaaagggctgaagtataattcccaggcaccatgaaaacaattctcacaaaaattttaacaaatgtggtattttggtagttttgtccaatataagaaatacaatgttcacataagccaattatttgagaatatgtttcagtatatcacactttttaaaatatgtttttacaaataaaataaatgtacatctgtgacatggataaaggccaagcattatgattcatgcattagtttttaaaaatcagaatcattgttattcaacttgtcagtgtcttacaacgaagagcaataatattcagttgctaatagcagacaaatgctattttccttttgagggtttgacacttagtctaaccatctgtaagtagaacagcttatttgactagttctacaatgaagaatttgccattgtaaaaactgtgttatggaagaacattaagactgccatattctttggggcaaggtttatatcttatccatcccttatagctccaagtactgtgcattgcacatagtagatgctcaatatatttttgctgattgaacagaaaataacagcagtcattaatttaatttgccatgtctttaataaaatgagagcttacccagcacatttacaaatgcgtttgccagtaaatatccatattcattagaggcattgcactgatagactgcacttgatctttcttgaacatttgaaaaaataatggtatcgccatctatttttctgctggggtcatcaggggcaactgtttggatgtaaaaatagaaagtatttattcctatttgcttaaaagatgtatattaagcttgtaaagtcagtaggacataaataaagactgctctaagtacatgcagtaagaataagactagaatttaggcagaaaccagaacattttccttctcagaattgagttatatattagcaagggtatgtgctcaatattcatttagtcttaagtcgattgattctgtaacactaagtattatttatttttatttttatttttttaaagacctttccattcacttgccccttgtatcttttttttaattatactttaagttttagggtacatgtgcacaatgtgcaggtttgttacatatgtatacatgtgccatgttgaacaccaagtattattttgagagatgcagaaaaaaaactcttacaagtttaggtgaaaattgcattacaaattcaggaaaacattgccgtgttcaagagattgtggttatttaggagaaaaaaagttaacgatcaagaggaaatagcaaaagctagtaaaaaatatagaaacactccagcttgttcaaacctgttccttttaggagcctcttcttgacataaataaatcaacaaatacataaacactacggggctaataaccaaatgtgaaaatatttaattttctgctgtggatattcttgaagctgaagtataaataaattgtgtaaattcctcttgaagacaatgttttcagctaaatctctcaagtattaaaacgttaggaacaggcttgatccttactgaagtggaatagaactggctgggtaacacagtatgtgaggatttagtcccgggcatgcccagcaatttggaacttctgtgagattggagatgaattcctttctgtgaacgatacactttaggctttgagcttatattgctttagaagtacactaagagggatttaggtctctgtctcagcacgatgatcaaaatcaaaactaaataacagcaccttttctcttaaactgctcctgcaacttgaagcatttaagaagactttatgttctttctaagcaccatttctttttccttggtgaaaggaaaaggatgtgcatctaagacacactcatcactgtatttagactcttttatcacttttaaaataaaaaaaaatttgtttcatctgtggtttattaacccactgtaataaaaatcaaccaaaccatagtacatccttgttttatgacccaaactcgaagtatttggctccctcattctgtaatagttttccacggttgctgtaacaacttaccacaaatgtagtggcttagaacaacacaaatttactgtcatacagttctgtaggttagaagtctgacatgggtcacactgctctaaaaccaatgcgtgagcagagctgcgtcgctttctgaaggttctaggggagaatccatgtccttgccttttccagcctctggaggctgcccacattccttggcccatggtcctcttcctccattttcaaagctgtcgatgttgcatctctctgatcattcttccatagtcacctttctttccaaccaaagccggaaaaggcactctgcttttgggggctcatgtaattaaattgggcccaaattagatagtccaggataacctccccatctcaaggcccttaaccttaatcacatgtgcaaattcccttttgccatgtaaggtgacatattcatagtttctagggattgggatgtagacatcatggcggggtggggtagaaggagggattattctgtctaccacatactgtatcacatttatagcctaaaagtcttttagatgttttagactagaatattttaaaaattcgccatacatttaagttcagaataagtttttagcatccaaggattattaaaactctaacttacaagttactcctcatggactgattaacgtcttcattcccaaggaaaaatgtaacaaaaaagcagttgttcaacactctgattaccatcagtaactcatttatgaaatcatcttagatactccaggttgttcaactagttatgtgggggtgtcgagatactttgaattgacttcttagcttacatctcctatttatgactctaataatttcaaaattgccttaaggaacatgttcttccaaatcaaagacaaatacaagtcataattccttcaacagggtatatagattcgttgataaaagacagcagaggatggatatgacacactggcctagaaagggaactgtagctgtggcaggcagccatggatcctgaaaacacagtgtaccttagggcagccatggaccctgaaaacacagtgtaccttagggcagccatggaccctgaaaatgcagtgtaacttagggcagcccatgtgtcccagatcccaagtcttgtatgactggggcctgactcacacagtctcagtgatgctcacctactgcctcatcaaggggtgctggaacacaaagcagcatttctggagacttgttctctgtcagtgattcttagcacttctggtcattatataaaaaagatacttgcacacacatgttgatagcagcacaattcgcaattgcaaaaatatggaaccagcccaaatgccatcaatcaatgagtggataaagaaatacacacacacacacacacacacacacacacacacacacacacacacactatgaaatactactcagccatacaaagaaatgaaataatggcattcacagcaacctagatggaattggagatcattattctaagtgaagtaactcaggaatggaaaaccaaacattatatgttctcactcataagtgggagctaagctatgaggacacaaaggcataagaatgatatattgaactttggggtctcaaaggaaagtgtggggggcagcgaggcataaaagactatatattgggtacagtgtgtacactgctcgggtggccggtgcaccaaaatctcagaacttattcatgtaaccaaatgccacctgttgcccaaaaatctatggaaataaaaaataatacaagaataaagtagagaaacaaactaaatttttaaggtcggtaaaaaaaaaaaaaaaagaaaaagattcttagcacttctggacccagcacttgggctctcagtgctgggactcttcagggcactctcggtgcccaccatgtgcccaccctgaccgcatctctgtggatgttccaggcagtggaatagagtggctgtgtattttagactgtgatgaatcccaggcagagctctgggccgaatctctctggatgggtggcagactacataagagttcctcaaattccttaaatgtattgagtttttaaaagttacaccaccacgcgatatttaatggctaaagggctctagttctgaagatctgttgcacaatgtgaaaatgcttaacactactgaactgtacacttaaaatggttaagatggtaaattttgttatgtgtttttaccacaataataataataatgttacacgaccatgaacttggagggcaaagctcaacaatgtcagtaggacaattttccccaagtggagactcatcagtcacaaacaaaccatgtcagaaagcttttctgttgctctcagttgcacttttctttgctatcaactctttgggaaggtatttttttacctgaaaggcatctgactgtatctgccttatatatgctaaatagagcagtcttcaaatatttatttttggcaaggtatttaggaacaaaataaaccctttaggtaataacaatgagtaagcagacctctctccatgggagttttccttaagtacttgtttaaaaaatgcaaacaaacccaggaactgtcacggtgacatatggaggctcggttggtagctggacacagagtaaaatcactaatgtagagacatttggagcctttggatgggctggctagtgggtagagtaactctctagcatgcaaatccaaattatccagaggaataatcattaattctaggaataaccaacttcatctgctgtcaataaacactggagaaagaaatttaaaagcacagaatccctacaaataacttaaagccacaaagataaggtccagaactggggtgatggccttcagaaaatacttataacccaactctcctgatgttggtaggtaaaaatataaacactttcaacatatagataatgagaataataataataatcatgccatcttacatgaacagagtacgatcaatctttaaaatgcttttacatttactgcataatttcattttaaaaagaactttgtgaaacaggctaatcatatagtattttatgcattttggagatgagagactacaaatggcagcatgtactggtttgttcaaatgaggttactgctcaggttttctcagttagtcaactttgtaaacatttcctggaacgtgaacatttgggcataatgtagaacacatttctgggagaagagttaaatttccctcttcatttacttattccatccctacaagaggatgccactgagccccttagttttgtgaaaaggaagaagggaggatgccttgatgaaatcccaggaatatcctggaccagtcctccattctcctggtgcttatcttacattcctggctttcaacatctttcattgtgagaaaaatatgtcacagtgccaggaagaggtcttctgcccattctcattctcttagttcttttccctcctcatccctgagaggacaggggccttttaacacaataacggtgtgatcttatccacgtttcatgcagaagagtctgacagacctaatacaacgcacgctggaaactatcaaggatctgcaagtgttagactctcctgcagagataggaatcacagtggccacagccttgggcaccaccaccagaatggcacaggctctccagtggggaagaccaagaggaagaaaaaggaactcaaaaacacccccctcagtgtggctttgaagtcctgaaaagcaacctcctagggtagagcagggaaatgctttgccccatcctgccaatagcaagttcattttctttctggtcctgggttctattttcacaccctcccattacacaataaaattaaagctctctttcagcactagttctctgcagctgtgttcttttatctgacttctgtagattgttttaaaactattttaggtggttttgggaaatttccacatttatttaatacagcctgtaatttttgcttcaaggaaagctttaagtaatctggccagtcctggggatgggggaagggtaaagctttaggagacaatgaaataaaagcccagacacttttggagttaatttttccagttttttttttttaaaacaacagctttcaggtcttaaatgcagtcacagatcaataacattgcattttgctaaaagaacccttcttaccattcccctccctgaaccagcttctccttttacagtatttatgtgcactcggcagccagagcctgcagaggcgaaaggagacagtcagtgtccttaggtgctcgcctgcaagtcaggagtggggaggctgtgtacctggcagtatggtcccctgactgtatctctgttgtgtggcacaggagacaaacttcaggcacctggaggggacactgcacagcccctgacaacagtagttcagaagcacagctgtttcctgtgcctcacccgcagcagctggtccacctgcaatttctgcagtctcttggatagaaagtgctgtcagcaagccagcttgtgctcccagctcacttctggcgcctatgctaggaccccatgatgaaggcaaggagtcttcattgtgctaattcagccctgtcacacatggtggcagactgtgccctcagttcctaccttcacctctctgcatctccctgtcatccttcccccgtctcccagccgtgctagatgtggggtgcacaagtcagcaaactccagatgggaagcaagcactggtgctccgtttccaggatggtccctaaccctcaaaggcaattcccttcaggggcctctaaattcatgggacaattaccaagaaggggatgaaaaagagagcggcacagggctccttaaatgtctattaatgttttggatagtttctgcacccccctcattctctcattattttggatcaggggagatcaacacacagtgggggcatgcagggttcactttgaacttagctgttgaagacttagcatccacccatgtggccactcagcagaagctgcagatgggccagctgcagaaggccaggggcagggcacagctgtacctttgcagggtcatcgtgcagaaagctgtgcagaggccccgctggctcatcatcttttagttatgagatgtccaaatggtaatccactttcagcttggccaccagatgtcgagaaagaccccttccagggaagcttcacagtaccttggtataaacatgcagcacctgctaccagcaccacggagcggcctggtggtgccgggctccttgctttgctgccacaccatgtggtattcctctccctgcacgtccactagagtgactgctctgaggcacaccagagggtgagcgaccctggatctataggagctatggaattccagccttgtcttctcagtctccttttttctgtctcagggggccttaaagaagacttttgggatggaagagatgagctgatctgatttgagacatttagtcctaactctttcttctctacctactcagacaatttagggttacaagaggaactactctttctgctattactactctgtacccccaaagcaggccttttatggttgattctccccacaaaaatgtaatttaaaaggggagtgttattatgttatgagtgtattttcaaagctgttaagatgactggatttacaaggttccctcagaggcactgcatactctggtactatggtctgaatatttgtgtccctccaaaattcatgttgaaacctaactccaaggttaagaggtggggtctctgggaggtgatcaggaaatgagggtttccccctcatgaatgagattggtgctgttctaaaggtcttgagggagcccgtatgctccttctaccatgtgaggacacatagcagcatctgtgaggaacaggccatcaccagacatgaaatctgctggttctttgatcttggactttccagcctccagaactgtgagcaatatatttctgttgtttataaattacccagtctaaggcattttgttatagcagcaggaatggactaagatggctggtttggaaggacaacaagctgagcaaatcaagaagaaaaatcagcttcattatttaatcctcccctgcttatgtcatccacccacatctcaattttccttgcatagtattgcactctggctgccaagcttgagggtttatcccctagcttccccattttccctgctgaagggctagatggatggttccttccacttgtcagtttcactgagtctagatctcagggacacttttaaacttccataaatggacacaaaaactctgagctgcaaaacatggtgcaaaagtatcaagcatgtatcatcatttattgccattttgtatgcattcctgagaaaatcatacattgtaccagctaattttttgttgatttttttgtagaagcaggattttgccctgttgcccaggctggtctctaactcctgtactcaagaaatccgcccgccatagcctctgaaagtgctgggattacaggctcacatgagccaccataaaacttttttagttctaggctttcttctactttttcctctcagttttcactcatattcccctgagagtagcaagagcttcctgaaacacaaccacaaagtactctctgccatttctctggatcctgatcctggttaaaattgggaatggaaatacccaaaccctatttgctggcctctagcatctgttttctcccaggaatacacttccttctacagtgaagacagtctgcctgtttcaaagtatctgacagctactgtactacgagacacaagtgaacttccaataaatattcatggggcaggctacaacgactcagtcaccctgcagttgtcagaccttgatggtaagaaacagagacttgtgccactttaaatctgccagcaggtttttggaaccatcttaggggaagtgtgtgtgttactttgggaaagtcaattcggcagaccttttggttatgtaaatgtagaaccaatattggattctgacttggaggcagtcaaagccaatctgtcctgtatcataagcctgagggctatctttattgtgagtaaagaatacctttgcaggtaatcatgttattgactgggagagtgaacctaaggctgggtttgatgctgaaactgactttctctgtcttggtgtctaagaggaggtctgaactccaagaaggggaaaatgttgaaagatgctcctctcggcagtagctggtggtgggtggggtagaggaagaggagagtctagtgggttctctgttcatggccatggcttaggaattaaggagcagtgaggtgcaacatccatttaaagattttttctttgctataattcccttgactctccccaagcctttagccaagttttgtaaagctggcctttgctatgatttagcagattaatgggagggcctgaagccacacgctgggaagcatagtggtagcttggagatattggctaatgaagtggaaggagtggagcatcggagcagggaggctgctgaacggggcaacaagtatagccaggatgcccaggtgctgctcaaggatgatagcagcagctctcagggagggagcactagtcaaaggtaaagcatcctgcatacgatcagggtcagaggatgtgttcttctttgggtatcaaatgggacggtgaccttggaagacagtgagaacacctgggctatacttgctatacttatgactgaaaactctttatattaagacagctgggtttcttatgcttgtcatatccattggctctatgccgagtctccccacctatctcctctagtgcctgtgacatttctacaaatcacttgatgttttgcacaaagaagatcatctaaactttgaagtgatatttatttctgaccctgtcattcttcccattatccatgtaaaaagcagacgaaatattgccaagtaccagtcatcacatgccattatgttaacagcataaactattcacattcataataaatatctaatggtaataaaatgcaaaggtaatttggtgcctgtgtttaacatacatgtggcttccttccttaacctgagttatttttttatcaccatttattcactgtcgggatgtatatatgctctgaaaatatactgcaattagaaccactcaaggcaacttactttctattgggactccatttgttaaccagctaattctgggtttggggttgccattagctctgcagatcaaggtcccatcctctcctggggacagcacaagattttgaggggctgtgatccagtatggagccgctttataggaggaagaaaaaagaccaaaaatctgaatcaaataagcattttagcaaaagaacatattgaactattttaataatacaagcaagtacttcacactaaattagtctcattttttttgagcgaatagatttataaacaatgcttcaaagaacacttaagattttcaaagaatgtttaaagagactcactgacgtatatgtattatttctagacctgtttgatacaaatttcattttctcattttatattaaaattaatcagacatcaaagaggtgacagatttatctaagcatacagagaaaattacatgtacaggtagggctaagaaacacaaatttaaattctggaccaggcatggtggctcatgcctgtaatcccaacactttgggaagccaaagtggctggatcacttgaggtcaggagttcgaaaccagcctggccgacatggtaaaaccctgttgctattaaaaatacaaaaaaaaaaaaaaaaattagccaggtgtggtggtgggcacctgtaatcccacctacttgggaggctgaggcaggagaattgcttgaacccgggaggtggaggttgcagtgagccaagatagcccattacactccagcctgggcaacagagcgagactccaactcaaaataataaataaataaataaaataaattctgagccctgtagaatatatataattaggaagcaacttaaaaacatcatttttgaaaagttgcaaaggtattatagagcatttccatacctccttccctcagcttcctctaatgttaacatcttatgtgaccatggtctagttacctaacgaaaagttaacaatggtacttaactaaactacacattctgttaggatttccgtttttgcattaatgtcttgtttctgtcccaggatcctgtcctagacaccgtatttacttgtaacgtcttttgcatttacttgtcatcatctccaatctgacaatttcttggtctttccttgtcttttgtgaccttgacacttttgaagagtactggtcagttatttcgtagactgtcttacggcttaggtttgtctgatgttttctcatgattaccctgaggttttgggcttttgagaatatcccaaaggtaatgaacccttctacttgtaccatatgggggaatatatgatatcaaacatgacttattattattgacgttaacattcatcacttggttaagacagtgtctgccaggtttctccactccaaagttactatttccctggattccatactctgttcattagtgtccagcatacactcaagaagagggaaagtaagctccatcttctaaagaaaggagtaataaagtatttgtggacacgctaaaacttccccagtaattaatttctgcgggatagaaacactttgaagctatgcaaatatcctgtttctccttaaagtttcacccactaattttagcattcattgtttgatcttgccggctctagttattactgtgggattctaatattgacttttctatttccttcattattcctatattcattaactgggattcttttgtgaggaagatttgaacaagtaaatttttaacctgatttagatgcactaccaatagcaatgagaagagagtcaaggtaccatgaatgttgacataactttacatttaccattactaaaaatgtaatgaaaaccacatttaattaaagtttcagggtctctcatgaaggcaagaagaatggattttaaacaatatacctttaactctaacagaaatggtatggtggatggctcctaatgcgttttttgctatacattggtaatttccagagtctgcttctgaaacatgaatgatctgcaaggttttctcaaagttcttataaactgtcctgtttttgggtagcattccatcttcctttgcccagtaaataattggggtaggcctgataggataaataaataatgatgttacaaaaaaggaatccacctatgactacttttgaggatgaattttcatgcaactttgtaacaaatctttattaaaaaatcataagaaatacatagatattttaattagcaccacacttttataaataatgctcacagttttacgttttcacataatcagaactatactaattgatggcacaccataaacttcgatgtcaatgatacagtatgaatgccagcatgagttgctttactgatggggcctaattatttttttcaacgttgtgactaataaggaactcttggaaatttttacatgaagctactatgttaatcaaaagaattactattatattaatgatactgaattataatttttcatcagctgggattaaacatgtacagagaaaaactcataaacatatctatgaccataaacctttgtatacatttccatatcaaatggaataattttcctattttacagcagtctatctgatgatgttaactaagtaataagggaaagagctttttttccttagtttcattattagtgacatttaaaaatattattacactaattaagaatagatcaaacttaggtattactcataccatttgtcacccaatgttttgttttgtttttttttttgagatggagtcttgctctgtcacccaggctggagtgcagtggcacgatctgagctcactgcaagctccgcctcccaggttcacgccattctcctgcctcagcctcccgagtagctgggactacaggtgcccgccaccatgcctagctaattttttgtatttttagtagagatggggtttcattgttttagtcagtatggtctcgatctcctgatcttgtgatccacccgcctcagcctcccaaagtgctgggattataggcgtgagccaccgcgcctggtcccaactgtgttttttattgtcatggaatatggagacagatgaaaagtcagaatataggcttggagttagaagatctttagaattccaaccctgtccctggatttctgatctttttgaggcttagtttccttagttgccttaatagggataataatgcttgacttgaactaatgactttagaaagttttcatgaaggtaaaataaaaatccattcaacacaaaaatttcctaagtactgaactatacaccaagcactgagctgtgtgttgggaagatgatgaagaaaatatggtccaggccctcaggaagataacaatatttgtcaatagaaatgcaagtgactctgaataagaacagctcagcccagaagggatcatcatggcagatgggaggcagaactacattgcagctctgatgcggatggacagagcagcatgtggaggcttgcatcgtgaattttagctccagaataactgcaagaacaaacctgctgaaaggactcacagactctctgaaggaattggactgctcctgcaggacccgggagatatcccaaatactgtgagtgcccaaactgcagaagtgaaaaactggtttgtgggagaagtttctgactttacctggagctgagtcaatttagagagctgagtgaaatacaggggtagaggaagcagcaggaaaggccttgggagctcgctgggtccccaagcaggccattcctgcctggcaccacagagatccttcaggagggcagccagaggtgtggggaaaatgccacagggagaaggaagtctccagctgaactttataacaatttgaaccagacgagaaacctcctggccagaactcgggaaagggcatgaatccagcatgcagactccataggctggggaagaactaagcccttttcttttgccgctgggaggtggatagtctggggcaagttctcaagccccgctcacccactgcctggaaacagacttggggctgttagggtaggcactgtgggagtgagactggccttttggtttgcgtgggagctgggtgaggcctgtgactgctggatttccctcgcttccccaacaacctgcatgactcagcagagggacaacttgcatgactcagcagaggcagccttaatcctcctaggtacacaactccattgatctgggaacctcaccccctcccccacagcagccacagcaagacccaaagagagtctgagctcagacacacctagccctacccccacctgaggggccttctctaccaactctggtagctgaagacaaagggcatataatcttgggagttctagtgctccactcaccaccagttcctctccatactaccagaactgatactctctggaaagcacctggcaggaggccaaccagcacaaaaatagaacattaaaccaccaaacctaagaaccctcacagagtccatttcaaccccctgccacctccaccagaacaggtgctggtatctatggtggagaggccgatggttcacatcacaggactctgtgcaaacaaactccaatagcagcctggagatgggtagacttgccaggtggctagacccagaagagagataacaatcactgcagcttggctcataggaagccacatccataggaaaacggggagagtactacatcaagggaaaaccccatgggacaaaagaatctgaacaacagacttcagccctagaccttccctctgacagaatctacccaaatgagaaggaaccagaaaaccaactctggtaatatgactaaacaaggatttttaacacccaccaaagaatcacactagctcaccagcaatggatccaaaccaagaagaaatccctgatttacctgaaaaagaattcagaaggttagttattaagcttatcagagaggcaccagagaaaggcaaagcccaatgtaaggaaatccaaaaaacaatacaagaagcaaagggagaaatagtctaggaaatagacactataaagaaaaaacaatcaaaacttcaggaaacattggacacacttatagaaatgcaaaatgctctgaaaaatctcagcaatagaactgaacaagtagaagagagaaattaagagcttgaagacaaagtctttcaatgaacccaatccaacaaatacaaagagaaaagaataggaaaatatgaacaaagcctccaagaagtctgggattatgttaaatgaccaaacctaagaatactcagtgttcctgaggaataagagaaatctaaaagtttggaaaacacatttggaggaataatcgaggaaaacttttctggccttgctagggacctagacattcaaatacaggaagcacaaagaacacctggaaaactcatctcaaaaagatgtccaggcacattgtcatcaggttatccaaagttaagatgacggaaataatctaaagagctgtgagacaaaagcatgaggtaacctataaaggaacacctatcagattaacagcagagttctcagcagaaatcctacaagctagaagggattggggccctatcttcagcctccacaaacaaaacaattatcagtcaagaattttgtatccagcgaaactaagcatcatatttgaaggaaagatacagtctttttcagacaaacaaatgctgagagaatttgccattaccaaaccaccactacaagaactgctaaaaggagttctaaatcttaaaacaaatcctggaaacacatcaaaacagaacctctttaaagcataaatcacacaggacctataaaacaaaaatataattcaaaaagcaaaaacaaaaaataaaaaacccaaggtacacaggcaacaaatagcacaatgaatgcaagggtatctcacatctcaatattaacattgaatgtaaatggcctgagtgctccacttaaaagatacagaactgcagaatggataagaactcaccaccaactatctgctgccttcaggagactcacctaacacataaggactcacataaacttaaaataaaggagtggaaaaagttatttcatgcaaatggacaccaaaagcaagcaggggtagctatttttgtatcagacaaaacaaactttaaagcaacagcagttaaaagagacaaagaaggacattatataatggtaaaaggccttgtcgaacaggaaaatatcacaatcctaaacatatatacacctaacaatggagctcctaaatttataaaacaattactaatagtcctgagagtttttagcatgaagggctgttgaattttgtcgaaggccttttctgcatctattaagatgatcatgtggtttttgtcactggttctctttatgtgatagattatgtttattgatttgcatatgttgaaccagccttgcatcccagggatgaagccgaattgattgtggtggataagctttttgatgtgctgctggattcagtttgccagtattttattgaggatttttgcatcaatgttcatcagggatattggcctgaaattttctactttcgttgtgtctctgccaggttttggtatcaggatgatgctggcctcacaaaatgagttagggaggataccctctttttctgttgcttggaatagcttcagaaggaatggtaccagctcctttttgtacctctggtagaatttggctgtaaatccatctggtcctgggctttttttggttggtaggctattaattactgcctcaatttcagaacttcttattggtctattcagggatttgacttcttcctagtttagtcttgggagggtgaatgtgtccaggaatttatccatctcttctagattttctagtttatttgcgtagaggtgtttatagtattctctatactctatatggtggtagtttgtatttctgtgggatcagtggtgatatcccttttatcattttttattgtgtctatttgactcttctctctttcttctttattagtctggctagtggtctattttgttaatcttttcaaaaaaccagctcctggatttattgattttttgaagggtttttcatgtctctatcgcctttagttctgctctgatcttagttatttcttgttttctgctagcttttgaatttgtttcggttgcttctctagttcttttaattgtgatgttagggtatcaaatttagatctttcccactttgtcctgtagacattagtgtataaatttccctctaaacactgctttagctgtacattgtgatcctggtacattgtgtctttgttctcattggtttcaaagaacttatttatttctgccttaatttcgttatttacccagtagtcactcaggagcaggttgatcagtttccatgtagttgtgtggttttgaatgagtttctcaatcctgagttctaatttgattgcagtgtggtctgacagactgttatgatttctgttcttctgcatttggtgaggagtgttttacttccaattatgtggtcaattttagaataagtgtgatgtggtgctggaaagaatgtatattctgttgatttggggtggagagttctgtagatgtctatcaggtctgcttggtccagagctgagttcaagtcctaaatatccctgttaattttctgtctcactgatctgtctaatattgacagcagggtgttaaagtgtcccactattttttttttttttttttgagatggagtcttgctctgtcacccaggctggagtgcagtggtgcgatctcggctcactgcaagctccgcatcctgggttcacgccattctcctgcctcagcctcccaagtagctgggactacaggtgcctgccaccatgcctagctaattttttgtattttttttagtacagatggggtttcaccatgttagccaggatggtctcgatctcctgacctcatgatccacccgcctcagcctcccaaagtgctgggattacaagcatgagccaccgcgcctggccatctcccactatttttgtgtgggagtctaagtgtctttgtatgtctctaagaacttgctttatgaatctgggtgcttctgtattggctccatatatttttgggatagttagctcttcttgttgcattgatccctttaccattatgtaatacccttgtcttttttgatctttgctggtttaaagtctgttttatcagactacaactgcaacccctgccttttttttttttttttgcttttcatttgcttggtaaatattcctccatccctttattttgagcctatgtgtgtatttgcacatgaggctggtctcctgaatacagcacactgatgggtcttgattcgttatccaatttgccagcctgcgtcttttaatttgggcatttagccctttacatttaaggttaatattgttatgtgtgaatttgatcctgtcattatgatgctagctggttattctgcgcgttagttgatgcagtttcttcatagtgtcgatggtgtttacaattcgttatgtttttgcagtggctggttctggtttttcctttccatatttagtgcttccttcaggagatcttgtaaggcaggcctggtggtgacaaaacccctcaggatttgcttgtctgtaaaggatttttatttctcctttacttacgaagcttagtttggctggatatgaaattctgggttgaaaattcttttctttaagaatgttgaatattggcccccactttcttctggcttgtagggtttctgccaaaagatccgctgttagtctgatgggctttcctttgtggagaacccaacctttctctctggttgtccttaacattttttccttcattgcaaccttggtgaatctgatgattatttgtcttggggttgctcttcttgaggagtatctttgtggtgttctctgtatttcctgaatttgaatgttggcctctcttgctaggttggggaagttctcctggataatatcctgaaaagtgttttccaacttggttccattctccctgtcactttcaggtacaccaatcaaacgtaggtttggtcttttcacatagtcccatatttcttggagacttcattcattctttttcattcttttttctctaatcttgtcttcacactttatttcattaagttgatcttctatctctgttatcctttcttccacttgtttgattcagctatcaatacttgtgtatgcgtcacgaagttctcgtgctgtgtttttcagctccatccggtcatttatgttcttctctaaactggttattctaattagcaattcctctaaccttttttcaaggttcttagcttccttgcattgggttagaataagctcctttagctcagaggagtttactattacccaccttctgaagcccacttctgtcaattcgtcaaactcattttctgtccagttttgttcccttgctggtgagtagttgtgatcctttggaggagaagaggcattctcgtttttggaactttcagaccttttgtactggtttttcctcatctttgtggatttatctacctttggtctttgatgttggtgaccccttcatatgggttttttgtgtggacgccctttttgttgatgctgatgctatttctttctgtttgttagtttttgttctaacagtcagggccctctgctgcaggtctgctggagtttgctggaggtccactccagacactgtttgcttgggtatcaccagcgaaggctgcagaacagcaaaggttgctgcctgttccctcctctggatgcttcatcccagaagggcacctgccagatgtcagccggagctctcctgtatgaggtgtctgtcgacccctgctgggaggtgtctcccagtcaggaggcacgggggtcagggacccacttgaggaggcagtctctcccttagcagagctcgagcactgtgctgggagatctgctgctcttttcagagccagcagcaggaatgtttaaatctgctgaagctgcgcccacagctgccccttcccccaggtgctctgtcccagagagatgggactttgatctataagcctttgactggggctgctgcctttctttcagtgatgccctgcccagagaggaggaatctagagaggcagtctgggtacagaggctttgctgagctgtggtaggctctgcccagttcaaacttcctggtgggtttgtttacactgtgaagggaaaaccacctacccaagcctcagtaatggcagatgcccataccccaccaacttagagcatcccaggtcgacttcagactgcagtgttggcagccagaatttcaaatcagtggatcttagcttgctgggcttcatgggggtgggatccgctgagctagatcacttggctccctggcttcagctccctttccaggggagtgaatggttctgtctcactggcgttccaggcaccactggggtatgaaaaaaaactcctgcagctagctcggtgtctgcccaaatggtcgcccagttttttgcttgaaacccagtgccctggtggtgtaggcaccccagggaatctcctggtctgtggattgcaaagaccatgggcaaagcatactatctgggccggaatgcactgttcctcctgttcctcatggcacagtccctcacggcttcccttggctgggggggggggggagttccccgaccccttgcacttcctgagtgaggtgacacccccaccctgcttcggctcgccctctgtgggctgcttccactgtctaaccagtcccaatgagatgaaccaggtacctcagctgggaatgcagaaatcacccaccttctgcatcgatcttgctgggagctgcagattggagctgctcctattcagccatctttctagccacccagaatacacattctattcaacagcacatggaactttcttgaagatggaccatatgataggccacaaaatgagcctcaataaatttaagaaaattgaaattatatcaagcactctctcagaccacagtggaataaaagtggaaatcaactccaaaaggaaccttcaaagccatgcaaaaacacggaaattaaataacctgctcctgaatgatcattgggtagaaaacgaaatcaagatggaaattaaaaaattcttcgaactgaacgacaatagtgacacaacctatcaaaacctctgggatacagcagaggcggtgctaagaggaaagttcatagctctaaacgcctacatcgaaaagactgaaagggcacaaactgacattctaaggtcacacctcaaggaactagagaaacaagaacaaaccaaacccaaacccagcagaagaaaggagataagatcacagcagaactaaatgaaattgaaacaaacaacaaaaaatacaaaagataaatgaaacaaacagctggttcttcgaaaagataaatacaattgatagaccattagcaagattaaccaagaaaagaagagagaaaatccaaataacctcatcaagaaatgaaaagggagatattacaactgacatcaccaaaatacaaaagctcactcaaggctgctatgaacacccttacacacataaactagaaaacctaaaagagatggataaattcctggaaaaatacaaccctcctagcttaaatcaggaaaagttagataccttaaacagaccaataataagcagcaagatcaaaatagtaattaaaaaattaccaaaaaaaagtccatgaccacatggattcacagcagaattctaccagacattcaaagaagaattggtaccaatccttttgacactattccaccagaaagagagaaccctccccaattcattctatgaagccagtatcaccctaataccaaaaccaggaaaggacataaccaaaaaaagaaactatggactgatatccctgaggaacatagatgctaaaatccttaacaaaatactaggtaactgaatccagcaacatatcaaaaagataatccaccatgatcaagtgggttgtatactagggatgcagggatggtttaacatacacaagtcaataaatgtgatacaccacataaacagaattaaaaacaaaaatcgcacgatcatctcaatagatgcagaaaaagtatctgataaaatccagcatccctttattattaaaactttcagcaaaatcagcatgtaatgaacatacctcaatgtaataaaagccatctatgtcaaacccacagccaacataatactgagtggggaaaagttgaaagcattccctctgagaaatggaataagacaagaatgcccactcttaccactcctcttcaacatagtactggaagtcctagccagagcaatcagacaagagaaagaaataaagggtatccaaattcgtaaagaggaagtcaaactgtcactgtttgctgatgatatgatcatttaccttgaaaaccttaaagacttctccagaaaggccctagaactcataaaagaattcagcaaagtttccagatacaagattaatgtacacaaatcagtagctcttctatacaccaacagcaaccaagtagagagtcaaatcaagaactcaaccccctttataatagctgccaaaaaaaaaaaaatccttaggaatatacctaaccaaggaggcaaaagacctctacaaggaaaactacaaaacactacaaaaagaaatcacagacgacacaaatgaaaacacatcccatgctcatggaagagtagaatcaatattgtgaaaatgacatactgccaaaagcaatctacaaattcaatgcaatccccatcaaaataccaccattattctttacagaattagaaaaaaacattctaaaattcatatggaaccaaagaagaccccacacagccaaagcaagactaagcaaaaagaacaaatctggaggcctcacactacctgatttcaaactatactataaggccatggtcaccaaaacagcttgatactggtataaaaatacgcacaaagaccagtggaacagaatagagaacccagagataaacccaaatacttacagccaactgatcttcgacaaagcaaacaaaaacataaagtggggaaaggacacccttttcaataattggtgttgggataattggctagccacatgtaggagaatgaaactggatgttcatctctcaccttatataaaaaccaactcaagatgaattaagaacttaaatctaagacctgaaattataaaaattctagaaaatatcataggaaaaccccttctagatattggattaggcaaggaattcatgaccaagaacctgaaagcaaatgcaataaaaacaaagataaatacctgggacttaattaaattaaagagcttttgcatggcaaaaacaacagtcagcagagtaaacagacaacccacagagtgggaggaaatcttcacaatctatacatctgacaaaggactaatatccagaatctacaacaaactcaaacaaatcagcaagaaaaaaacagacaatcccatcaaaaactgggctaaggacatgaatagacagttttcaaaagaagatacacaaatggccaacaaacatgaaaaaatgctcaacatcactaatgatcagggaaatgcaaatcaaaaccgcaatgcaataccaccttactcctgcaagaatggccataaccaaaaaatcaaaaaaacagtagatgttggcatggatgcggttatcagggaacacttctacagtgctggtgggaatgtaaactagtacagcccctatggaaaacagtgtggagattccttaaagtaccaaaagtagaactgccatttcatccaggaatcccaccactgggtatctacccagaggaaaagaagtcattatacagaaaagatacttgcacacgcatgtttatagcatcacagtttgcaactgcaaaatcagggaaccaacccaaatgcccatcaatcaacaagtggataaagaaactgtggtatatatatatgtgatggaatactactcagccataaaaaggaatgaattaatggcatttgcggtgacctggatgagaatggagactattattctaagtgaagtaactcaggaatggaaaaccaaacactgtatgttctcactgatatgtgggagctaagctacgaggacacaaaggcataagaataacacaatggactttggggacttcaggggaagggtggaggagtgttgagggacaaaagactacaaatagagtacagcgtatattgttcgggtgatgggtgcaccaaaatctcacaaatcaccactaaataacttactccactaaataacttactcatgtaaccaaacaccacctgtaccccaataacctatggaaaataaaaaataatttaaaaaagcttagcccagtcatcacatggaaccatgagaaataataaattatggttcaagcaaaaaaaaaaaaagaaatgcaagtggtattaattgattataatattggtttggcttgtttggttaagtaagaaataaactgagcatatgtatctgatgaaatagcttctagaattaaaacatgctgtaagtataaaaataagtagattttgaaaatctatatacatgtggaatctgataacatattgatatttccttatagtcagactaatctgcatctcagatgatatgaaggtaagaaggagatggagatgaaagcatagtttcatagtttgaaattatgaaaaagccatgaattgttttggaggccagctactgtattgagccattgtcaggaattggaaatattttgattctataagtctgatggctggttggtaagtgatagagtcccaatcttggtcttacaacactccaaagttttaaaaattcttttgggagtattgtgaaatttccaaataccaaccatattttagttttttatgaaatatgtcatttgtgggaaaagaagtcattaaattgtgagaatagataccttctgctcccaaaggttggaggctggcagactatgccactctcttacaccataacgatggaaactgggaggatttttttttcttaattctagcagaagatatagggttttaacatatctttaaaagggggttttgctagttttccgtagcttgaggagctgagtaatgcatagtatgatttcctgcctcggccagcggaggcctccacgtgcctcctgaagtcaagttttcctggattcaggaaggaatgtgaaaccaatgagttgcctgtcaaggacagcagggatcacatgtgagggcagcacgtttctgagattctattccaggttttcagcagatgcgcccataccaatggtgtttgctctgtgtcaggcagaagacagggactatatagaaattccttgtaacacagagctaacatcacagttgcttttgtatttgggcaaggcctccctgcaactcctgtcaaaggcgcgtcagttctggggtagcttcaattttgaagtgtgcacaactaagttatttcaaagaatctaggcttggccttgtgacctgccaataggaagtaggtgaagggacagtgtgctagttctgaggctaggatttaagaggcaggccctgtgcatgatgtctgttgttaggagaataagccaggacaagactgcaagagagatgttagcaacttatggccatcaactcagatgccccagttaacagccagtagaccccaagagcactgctgagccacctaacagatacatgagcatgcttaactgaaattagccgaaccttgctggttagaggacaactgctctgtagacctcttgacaagtgatcagtaatcaatagctattatttttaagccactaaatttgaggtggctggttacaaactagcaaaataatatactctaattataatcatagcagtcacaaggtgattactgatacttattttaagatactactactatattaacaaaatattttaacaatgagacctaatatttcaacaatcataaggtgattactgatacttatttcaataagattactattacattaaaaaaattataacaataatatgagattcatatgcctactttggaaataattaccaaatttttcttgatgcttgctagaattagtagaagacaatgactcctcctatgatattattaacctctctctaccaacctactatatttttataagaaatgtacttcaggacagaaagtgttaactcacagtccttctgcaatgcactccagtgaaagcacatttcctcttaattcctctttgttacttgcattgccttctggagttaaaaatgttggtggcctctctctacttgatttagctgcaaacaagaaaatcagtatgcattacaacttataaatatgtatttctataaacacttcattgtcaaaaaagctgtctaaaattccaatccctttttaagctatttaacattaattgtgaaatttgttaagctacatacacatacacactctctgcgttataagtagtcatcacttactcagttacccaggaacagaaacaattttggtggcataagcactaataataaggactgttttccttttgtatactcccttaatttgggttaggtttttacaaattttctgtgggttagaaaattttcaatatgttgacatggagaggaaaatcatgttatcaaactacatttcccttaggattagtgcttaggtcgaagcaaaaattaactgtctatcttctggaagatgttagatttttataaagatatggttatagaaggggtattctggtttacagtggggacaacattatagccaataccactgattaatcatattaagatcctcaaactgtgaggtttatggaaaacaaaagtagagagttactgacagaggtcttgcaaatattatgccacaaaataagaataatggtggagttaaataaatggaaatcattttcctcaataaaaaaataaagaggatccaagtcaaagatcttagggatagttacacaggccatcttcttttttatggaggcctttccaaaacatagccttatcttctgaaggtttcttagaaaaacttggagcagaaattacatcatcttaaggttttatagcccttgaaggttttcaactctttaatgcattatctacttgatgcttataaaaatttaatgaaaaggtcatatactatgaattattctcatttctcagaagaaaaaattcaatgccagaagatatattacttgagaaaaattagttttcctaagaatttagagattgtagcggggaaacttactcctctaaaatcactttgggaatggtcttggggcccatatttttcaggagtatattcaaataaaataacagaaagcagcagttgtggagtgtctatcttggtcactgatgagaccttaatgtcttttacttatatctcaagggtgaaaaattaatacagcagaaattctaccttatggataattaagaggaccctttatccaaaacccattattttcattcatagactctacttgagaacatttcccttaagggaatcaaattcatttctatctaaaataatgaaggtaaatgctctacttttaaaaagattacttccattgaagacagtgacttggtttgacttacttttaaacaaaactaagagagaaatctcattgctaattatattgataatgtcacatgaaaacagatgacaagtgtgatgatttactatgaaatccccttaatgttagttgctaaaagctttgatgagtcagtattctagcaagttaatgcaccctgccaactcttacttagttcacaagaaaagtttggaacagaacaaaacatggaaaacataattctgaacgtacgtgaaaggtttttccaaatcagtgaaatggttctttacacgcaaacagttacaacaggtttcattattacacatacatcatggaaaatgctctagtggcatgcttcaaagtttataggtaaatttcataagaaacatacatttatactagtggtatttaacatataactagaaatctcataaagaaataaggttaaatagtcatggaggtgaagttagtgaactaaattctacaatgaaggagagaatatcagttacaatcaccataactcaccaccataaaactcagtgtcactcaaattagcagctatagtgtcattcaattcatccactgaaataaacagaatattatgaagagggcataaaagtgggggagaagggtcaaaaagtattgggcaataaaagcaaacatatgcagctatcctgaccgagtgctgttcctatcaagtaaaaacagtgctttacattgtacatgactaactcattaatttactcagccacccccaccaggaatatgcagacatttaacttaagctgcaggaccgccaataagaggcactgtggagcataaagcacacataaatgctcagaacaccaggtggttcagaaggttatcatggaaccagtcatgacaataaaagcaaaaaatgtaaaatccaatattaagggtatgcacaatctttataacatatatgccaacactttagtgagcattcatgggtggcttcctgataatgaacctgtttacttcaaagtcagtagtatataatagtttctatattttgcacatatttgtaaatgtcattgaaggggagatttgggaagctgaactcttacctgaaatcaccttcacagaaataggttgcttctgctgtatggtttgagtatgattaaatctagcataacagatatagtcttcgcgggtgtcctctgggaggacattggaaaaataaaggtccccattcaaaccttgagaaactctctcactttgtggaagtctttgaaaggctggagaaaggcagagagatatcaagattattccatcataaagtggctaccctccaaattagcaagataaatgtacctactaataggtctgtgaacttcatttgaatatattttttctctatatagctctttgggtaaaagcaaataactgtaaaaaaaaaaaaaaaaatacgtaacacactaaaactctaactctacttccctgacagtaacttctctggggtgggggcagaggtgagattagagttatacagtgaaatctttttttaagcaaaagtgaacaaaatatgttttataaaaagttggcgtgacttttcctaatatctgagtccctaactgttaagtacacatacacatatatcttagaaaatcattaaggaagcttctaaaattgttaacatgggttgcatctacacacaacattcagaaactaaatacgtggagaccatctaacaatgagctgggtcctgtgctaggcactgggcatgccagagtcccagccctgtctgagctcatcatccagttgaagaatcaggcagcaaatggccagctgacagtaactgggtgtgatgatgacactatttatttaatgctgcaacctgcccctcacaagcctcccaagcccagttcctccacctcctctacaattcttttctgaattaattatcaccttctggcatactacatatctactcatcatacatatgacttattgcctatttcctgcactagaatttaagctccaggacggtgaacactttcatctgttttgtccactggaacagtgcctggcccttcacggggctcctttaaatgtgcactgaaggattaagtgagtaaccatcagcactctgactttccagtgtcaagcataataatttattagtacttccccttaggtccagttaaggaactatcttgccttaggtaggaggattttctttatcttttatggacacataataaactgtacatatttgtggggtacaatgtgatatttcaatacacatatacattgtgtaatgatcaaatcatggtaattagcatacccatcaccttagacagttacgatttctttgttgtgaaaacgttcaaaatcctctcttctagctatttgaaatatgcaatgcattactgttacccacagtcaccctactgtgcaatagtatcagaagttatttagagggaagattttctaagtggatgaaggatgcagggaggtggaacgattgatctgtgtgtgagttcacacttagccagctaatggacatcctgaagctcctgacttagtccacagagccttaactgtgagagttcttcagttctgtgaggtgacagaactgaaaaaagtcacacatcccagtggcctcaggccactatgtctcctgacagggtttttgcagtgtaagtcaagcaggtctgctcctcctatagcaggtgcttgatctaacatttcatgaaatgcaaaattatggttaaaagtctggagctccctcaggcagaaaaaggcaggaaaatgtggaggcagagcttcaaagaaagaacatcggttcatcatgttaatcaaattattggttaagatgggggtttggttggtggttgcaaatttatggttttaagccattagttcccgggaaaaggactgtttaaacaataacccaagccgggcttggtggctcatgtctgtaatcccagcactttgggaggccaaggtgggtggatcacctgaggtgaggagttcaagaccagtctggccaacatggcaaaaccctgtctctactaaaaatacgaaaattagccaggcgtggtggtttgcacctgtaatctcagttactcgggaagctgaggcaggagaatcacctgaacccgggaggcagaggctgcagtgagctgagattgtgccactgcactccagcctgggtgacagagcgagactccatctaaaacaaaaaaaaaaaccctcagaagaattaggtacattttgtttaacaaagagtttaagacaaaaacatttcttgtcctctgtttctcctgctgtagcaataaaataataaattgaagggtgttggcagaccaaatgttaggcgatgggacttcatgagggtggtggcattttgcattgcacttgaaaaaaaatgtatgcagataggaataacttaatgtcatcttgcaagaagtatgctatataaatttttttctcatattgcaggtgcaattccatttgaaaggtcagatgcttcaccaacagcctagaatgcatgtgagtggaaaaattagttatgtattcagatgactctgagactttacatgtgatatgtctctttattaagcaaaaaggtcattatttctgaataagaaccaagtaccaaatattgagccttattttggcagtggtattcggagagcattattcttaaagccataagtcacttatttacatttggcttactacttatttttgcaaaatctgtaaaagactagatttacttagctatatatttgttttttatttctttgtgttactttactttctctgagtgctttcatataaggagagccaaaatgcatcccagaacttaaagtaaaataaaaaaaaattaaattaaaaaattaaaatgcagattaaatgttagaggcaaattttctctttagtaatgtatatgtcttgtgagtgcacagacaatcaggtcactgaaaatagaacgtatttcctacagatacttttaattcattcccaccattccacctaaaagactattaacagggttaccaagaacctccaagatgtcaaattcagtagtcattttttagttctcatattatctgatctctcagcagcatttgaaatagctaataattgtgtctttcaaaaatattttctaaaattattatcattattttagggatggtgtctcactctgctgctgaggctgaactacagtgatgtgattgtagctcactgcagccttgaactcctgagctgaagcaatcctcccatcccagcctctcgattagctgggattacagtgtcagccaccctgcctggttaatccatctttttgacacacattcttcaccttgtccctggggacaccactctctttgttccttttttccttcagtgactgcttcttctcatctgctttgctgatttctccatgagttcttcacctctggagggctcctggtctcagtctcccagactctgctttcctgcttcccagatcctctcatctagcccaggcctctaggcaggacttacgcactaaggtttcaaacattgctgatcatagcctggaatcctccttctgactcaggtatctctgactcttgctggtgtcttgccatgaaatatcttacaggcctctcacatcccaaactctggtttcttagtctccaagcagaaccatgtactccctctaaggtaacacgctgacctattggcacaggaaattttggaaggtggaagaggcagagcaacaaacatgcccttgaggacagaaacaggggtagacaagtttgaaattgcctaatgaatagcttcattatatctgcctcagtttcctcatctggaaagtggaaaaaataattggacatgcctcatagggttgttgtaaaaattaatgaaataacccatgttaagcccttagtaaaaggcctgacacttggtaaaggcccaataactattagctattgctggggattaaaaaaactaacagaaacataacatatccccaacagcttgacttcctccccgccatgggtttctgggaatggcaattccattttatcattttggagttgttcaatctccaaaggtagttatccttgattcctctctctcatgctcccacccccaccccagtaaatcctggaggcttgaccctcaaaatatatccagaatcttaccatttcttacccattctactgctaccactcaagtccaagtcaccaacaaatttcatctagattacagcagtggccccaacagtctctctactctctcttttgcccgctatattctctacatatcaactgaagtgatactgttactacttattttatttcagataaagtcactccttcaacatttccctacttcattccaagctaaagccaaagtcctttccattgagtcctgtgacctttctcaccttctccatcaccctcccgctcggctccttcattagttcattagtctggccaccttgtcctccttgcttttatttttacacacagcagagatgctccttccttaggggctagcactagttttccctttctactcagatatttaggggcatggcttgctctctcatttccttaggtctctgctcaaaactctgctttttttttttcatagaacttattgccaacaaacacagattttctaaatgtacttattgcatttatcatctgcctccttccccactcctatctcctcccactgcaaagaatataagcaagatacatagtaaatgtccaataaaattgagtgagtgaatgagatgacatgttatttattttgaagagcagctgttttcctgagcatctctaaaacattttatgaatcataagaggtaataatgtattatgactgtaaacaatcctaagacttttaaagaaagaaagttcatattatcaaaacttacaattatccatccaaaatattataggtggtggtaatccaattgggggtctgcagggaagtactaaagactgaccactttgaagtgtgattggttcaagtttttctttggtccacaatggtgatcctattaaataaaaaaataacttctcagttatttctgcattgaaaagtacaaaaagaaagccctacaaataaaggcaaactgaagttttggagaaataatttgtaatttatgtacactaaattaatgagaaaatatttttaaatacaatgttaaaagaaaaaagtaaaaatttaaaaaatgacaattctcatgcattgccactgatagtataaattctcagtcagtgattccacagctgagaatttatactacatacatcatcaggaagacaaacagttttgacacaagcatgttcttcacaaaagaatggaaaacatttaaatgtaaaaagatttgctaaataaagaattacacatctacacctctgaataccatagagtattatataagtacacttatttataagatcgctatgggaatatacacgatatgtcaataagtcagaaaaggttgtaagatagtatttcagaaaatgagctggttttaaacacatacatacatatctgcctaggaaaaaatagaaagaatatttcagcagtagttatttccttgaatggaaggattcatgaacagtttttaaatttcttttttgtttaattagtttttctacaacgaacatgtattatacatgtaattttttttaaatgaccagaactgaaaaatgtgactgttatttaaatacatgctcttaaggtttttgagaggattttggtactaaccattgcaaaaagagccttaataatatcaaggtagtgaggacactccacttccagtaaaattttgaaacaaaaatgtttaaagaaatagcatttagaccttgatcacccatatcatactgaatttatttccatttggctgtaggaatttcactttcacaggagatacatgagaaataaataattagatgaactcagggaagaaacactttttttttttaaccccaatgtcttacacaggacttctgtaaaagatatattggattggtaaagcattggactaaggagcttcctagggtaaggtggaaaggagcaataactttcatgcaaaacaaagtcagaatattggaagcaatgccactgctttgttgaatagtatttggatgatgtcacagaagctgagtcttggagcaatactttaaaaagggtcatgttggttgacaagtttccacttactggatgggcggacaacaatgttattagaaactgcagctccgcgttcgttccttgctgtacactgatagactccttcataggtctcagctttcccttcgctcatgatgttaattatgagcgttcctgtgccaggcttcatggtgaccagagggtctttatcgatgtcaaaatgagtcccattacgggtccaggaaaagctgcccaacacacgaagtgttaagtgtattaatggtccagaaaaatgggattaccttaacaaattcctagcagttttatgggtttctagaaataattaccagattttaatattcagtaagagagcaataagccctcatatctaaaatgtttcattgaatcatgacctgggaaaaaagggcaggctatacattttaaggtacctgtcttctttagaactagcccaaatttgactcaataaagaaatcatgcacacaaattgcctgtcatttttctaagaaaatagagggagcaggtctcccaggtacactctcttagagctttattagcatttttactgtaaactccattgttcacagagttgataacctgtctataaaaatttgcttggggctaaaatgtgacaagacctctgcaagtactatttatatatgatgaaaattgatcagacaaatttcaagttaccaaattgtgaagtgtaggttgggaggaggttaagagacatcagttccagagtgtcttaaatgttgcttattaaaaatagtaactctacataaaacattttgggaatttttaattctagagatgattttgagaatcccttgggaggtatgcccaattgtcaactgagatccctctttctccattttatttttataaaagattgacttatataaaagtcacagtgctcatgtaattaaatactttacaactagtcacaaatcaatgatggccatgctcatacaaaggtacgaatctctaaacgtcacagtgttttctaggatcacttggatttcccttcccactgcttatctttatagcagttgttgtcacaaccagggcaggaactggtggtgtggatgctactggcatattgtgggcaggggccacggatgctgccaaatatcctacaatgcacaggacacttccatcccccaaacaaaatattatctatcacactccatatatcaacaatgctgaagaggataaatcctgttttatggcaagttacagaaggcattaattgtgaaactgaaaggaaacctcatcaagggataccacatcaggccttctgcgagagaggctttccattaacatagccgaatatattattttgaggcaaacctttgctggaagttttgacatagtacatattctgtcccagttaattttttctcaggggccagtttgtgataatttaataaggtctgtaatagacaaacctggaaataaaataactggaaactttcactactttattgcttaaaaatccacattacattttaataacaataacccaactctccaaaacttccatatatgactggacatgttacagatcatccgctgtggggccttgaataagttacttagcattaccaggcatcagtttcccatctataaaatgtattggttggactgggttatctctaatatctctcccaactctaaaatgctttgcagtgatctaaaatgctatgcaagatccaaatggcatgaattctcatgactgaactctgccaagtttggaaaaccattttagactattttataaactgttacaaagacagcagagatcttggaagtcatcaaattcaatctctttatagatgaggaaattaaagcccagagaaaagggatttgcctgtgccttatggccattagtatcaaaatcagaatcaaaaggctctttccataactcctcacaatttataagcattttgcagaaaagcatgggcacagaaatgcaataatctgggttttcaagaagaaaaaatgggctctaattaagcagagagacaaaacaatacacctacaggtgagactttagggatatgcaggacccaagaagttaccttcagtatctttgaagggctgaaatgggctgggatagatgaaccaaagggcaatctagtgagtcacagtgagaaatatccaactgaaaaaggaagtgctctacatagtctgccttgtttgatggaaattcccaaacatatttctctattcagagagatttcctgatttattctcagtactataacaaagcagaatgcacactcaccttgggggcggtttccctttggcttcacactggattacaatattctcccgagggtcaataatgtaatcttttggagactgttgggtgatggttggaggctgtaccacttaattgtagaaaaaaaaaaatgtaaaaaaacaaattatttaaaatcataatagtagccattttttcctgtatcaaaatcacttaccttagactaaatatgcttcaagtatttttagtaatttctagtgtagcagcatatacttcagtagatttttctgctaaaggtctgctaaaactgtgaagtcaaggtttaactttctttcggtaactatgtgtacttgcaaagtccattttctcacactaaaagtttggggaaataattatcaatacaaacctaatattaagacagtttcttttctgatgtaacaatgagaaattcttttgattcctttggttcaaatgatgtttttcaaaggaatttaagttatgataaatttgcatctttcttaagaaagagtaacagacttaggtcattagtgtgtgctcatataaatcaatatatgttggggacaaatacatttgagaagttaatattaaacagactgttaaactggagatgtgacatctcttatcagagccaggaggtaagtgaatgaggaacaaagataaaagagtcttatttagaagataaatggaattgaggaagttctctgtcctaggagacagtgttcccatttactcttcaaagtgttatctgatcttttattatcaaatcctatggggaaactgttctgacccagaacaatctaatctgaagaaacctgtatctggaccactaatgctcttcaaattgttctaaaatcaccatgtccttcttcttgtgagatcagaattagtgttatgacaggaagtgactaaagaataattttttacaacctgttttttcttactcagtgcagcaaaatggcttgactaggaaggcacaaagcagagacctaaactctctcaactggctcctggtaagaagccactgcttgcacaactccatggagagctgtttacacagaccagtggttctctaccagaggcaatttgtttccacccttccagggacatttggccatatctggaggccatttcaatggtctcgactggggtggtagtgatagtggtatctcgtagatagaggccagggatgttgctaaacatctaacaacgtacaggacaattccacacaacaaagacttatctggtctcaaacatccatagtgctgaggctgaaaagttctgaggcagacgacaatgtgcttggcacccctggagctgtgcaatgcagtggccataccacagcacctttcctctgcatctgggaaattcccccaaggccctctcttggattctcactgttctttcctttcctgctgcatttgacattctggctcatttaagtttttcatcttctggatcttccctttcctctctgcccatacctctgcttcctttgtgaaacttcttccacttgccaaccaaacatttctcaaagctcagtaactgcccactgttcttgtctctcttgtggttaattgttgctagagctaaatgtatcacctccacatcttcagtcttataaatctataaacccggttgcgtcctcttctcttgtcttctagtcttattgccatccacaagacatcttttactaaatattcaaataacagctaaagtacaaatcaaaagctagcctcattactgtcatcatttattgtgtactattatatgcagggtactgggcagtgtcagtttcccttccctttggaatatcccatccccctccttgtctttccagctgcccttcccccctccgtcatccatatggaatcctcatttttctagccttgtcagtttccaaggtggcctgattgttaagcactagtctgtttcttactagctgtgagatttcaagccaatttcttaacttctataagtcctagtttcctgagagggaaaataaagtttaaaagtagtattaccacctaggatagctagcaggattaagaaaataattactataaaattctcagtgtataccaatgttataatggttcaataacatcagctattttaaaattattatcataatcattttttatttggaccagattcacctctgaatgatccttcaggctctgggagtatatagaatttgggataatggaaggaagcctggaattccacatccaaggaatagtggccatagggagtgggggaggggattcttaggagtgactcagttcaattccttgtgcttttctgggagtgacacaggtgcaaatctggtggcttcagaggcagagcttctattcacaggtctgcagcagagctggctcagatgtcactcctaactgccaggagtttactgtctggatatacctccttaaacagtgcttgggtcacctgctaattaacaaatgcttttcagtagtaagaaaaacagtgattttacataattttcctggttaatctaacatcaaaggaaattatcaaatgcctgaaaactgactatttttaaactaggtgataaatgccacctgtcaaaggcagtggaaagttttgctcagagcaagccattcaaataccatgtgagtgggagctgcttatcttttgtccacttcaagacaagattcaaattcgctgggttagtctactgatggcacctagaaatactagtctacatagtcacgaaggctgaagaagcataaaaggacatacagctgccatcttgtgtaaagcttttgcctgcacccaccttctaaaagacacaaaaagacctatctttgttccagaaagcattaattagcctttacaacagatcagcattctctctaaattttgagaattttctcattgagttacatcagatgtgaataaagcttggaagttagtagagcagcacactggtaaaagaaagagtaatagccaagttttcagaattcatgcagataatactttacaactgcttcttggtattgaaatacaatgtttagctacagtaaacacacatgcttagaaagacaaaggtcacaaaacatgaaattgtgcatttaaatcacaatattaattcaaaaagcaaagacatggtcacattttcacactgcctagtaatttatagaaggacacttacagtcttcaagaagttttgctttttccccatcaatatcagcaggtaagtgggcaaagaggattaaagaaaatcagatgttaataataagaacgttagaactctgaagataaagggggcatcttgtctatttgatttgatctaagaaaacctgtatagtgaaggttgaatttgtgaagttgcaagacgaagaaatttgcattaacggtttcctttaatcttgcagcagctttcccacataaacatatggaagaacaaaagcaatgctgtaggcaaacgagttcttccaggaataggaatagcgaattccattccatatatgttgtgttggacaagtaattatgttcaatttgaaaaacagctgaaatctacaattaatttgagttgtcacatactgtgtagtgtctggtcatattatcccagacatcactgtgcatatggtaataatacctaacaatgggacattgctacagtgataatgctccatgcaagccaagtccaacactaattttagatttttatatttctatggttaatctccaaagtcattaattgaactttttagactgttagcagatttctgcttcataatttctcaatcactcaggggttgctggtgcccacaccaaggacttgttcatgtagtagagaaacgatgtaagaaataggggcagggaagaaattacattagcatgcaattcaaatcattccacagtgctgtctgtcgttactacttgcaaaggttaatataggagcacctgggtttttctgtgactttcttttcatcatggttatgcctcttctccgttagcagtgataattgagttagccataggtgactgtttccctctgcttgacagattgaacagtcagattaagggggaatatatttaatataagagagaacaaaagcatttctctcaaatgttttctttccctcctgtgtatctgtcagggcaaatgcttacttaggcattcccactccaatgggcttaagcaattgtatatttttttgaaaattgaaattaaggtcactggatgaattttttttaaataagaaaagcactgcattttattgaactttatagaagcacagcaaaaagtcaacaaagtgtgggacaaaccacatctcttcttaatgtcttcccactggcagttgcaacctctatggtaataataaataataataataataataaataaataaaaatgacatcccaacaattgaatagccccaggaaagtgctatcttccttgcaccttggaaagcttgccaaacagatattctattcaggaagctaatggcttcaaagaggtcatgcagatgagggataaaggagaaatcgattctgaagtacagtaattgtccagatttgaaattttgctttccatttgcaggaaaagtgactgggtggaacctagcattatctttatttttcacaaacaggccacccagagcagggagagcacagtatatatttactactaggaaaatggagggctaatacagtagctgttgtttgctccattttagtgctttgcatattacttgtatttttagcagttgcattttggcatttgaccacactgtttaaaccaaataagactatttgttaggctctagataagatacttttcctagttctagacttatatttaggattcaaaattggaaagtgagatgcgccttgtctgaatcaagagaaatgaattctggggtggtttagggattccgaggggcatggagttggcagaaggagcctcccctcatctttgcagaccaccctcagcatatgacgggaaagagtaaagtggtgaagggatgagtggggaggtctccatgatcattttaaagtggctcatatagttttcttgcaggactgcttctctaaagagccgcctgttgggaagatcaggcagcttgcacaactcaatccttctcaggccatccccagcagggcagacaaaaggcacctgagggggaagaaggagaatgacagggagggaattgtgagtctgaccatttcaatggccacttctacagtgtgaatctttataaacaccaggtgctgaaggtaaaagccaaattaattttgattagcttttcagtatcacacagacaccttctccattcacgcagttcagagtgatgataaatgctgggaggctttgactcctgggcctaacagctttaaaacgttaatacttacgatcaagaggtacttccagtgcactaatcatctggcacaggaagagaatcaggggcactctgcccgcagataagcgcttctttttcggcattattttaagctgcattagcttaactcctgctgagactcacacactgaatttccttttcttctttcacaaaagattttgtgaaacgttgtgtgcaacgtttaagtaattttcatgcgggaaactgaaaaaggatagagtaggaataataattataatgtattaaaaagaaggaaatgaagagcggaagtctgcagcacagagaactagccgtgtattatacatgaactctaaaagaaagttaacttttaaatatttaactctcaaaactggagtaatcatttattcataaatcagctaaaatcagttcagagatattagtagtgatatgaagcataatctgtctaccatccttatgatttttccattttaaatggtatttgtattatgagtgttcagaggctatcgtgtctttcccaacagatcaggaaaacttggcttttaagctggtcagcaagcaatcactttgtgactttagaggggtagcctaatggcttctccattctacagattatctctgggaaagttcaggggattgttgtaaatttgcttcaaagccaaaacactaatttaccagatgagcactgactattcaggtcttccccatctcccacctagattatagcaacaaacctagctgggctctgagttcgggccttcctccctgtagtcaccctccttcacagtgctgattaattttttctacaaggccttttctggttaaatattgggagtagccatatgtgatccctcaaagaaagtccaatgtatctttaaacaagtacttaaaaatctcagtgatctgggcttaatttctcctacaaacctgatttccttttatttccatataaccattttttggtttgatgatgcatttctgtttttctttcttgtgtcagtccttcgatatgcctcaaattttcctgccttcttgtctttgtttattctatttcatttgcctttatccaccatattttcttatcaaagtccaatttatttcttatggatcagttaaacggtcacctccaggaaacatcagctgatcacccgaactagaagttatttcaccaccacccctgaattcctgaaattccttgttgtaaacatcacatacataggtagatatatattaataaatagactgtgtgtatacacatattgcatacatgctctctactcctccaggaaaggactgtctctctcatctttgtagccctctcccaacacctaatacagcctgccttgcatattggaagtgtccattgcaaaatggagagcatgagcacaaacatattaatagaagattgatatccatcccacagtaaactcctacctgaaatgataggtttaatcatgtcctctcattcatgaagagaagtggggcaaccaatgactctctcaagaaggtgggagggatgttattattataaactgctgtacctcccacaagttgaagtactgaattatttatgtaatttttatttgtatgattgtatattttacgatgtccatcttttccaataaactgcaagtctcctcagggcagggatggcatctgtcctatcccccactgcatcctcatagcccatcacagtgcctggcacatggtaggtagtaaataaatatttggaggaaaaaaaaaggaaaggagaaaaggggaaagaaaagactttacaatctttgaagctgaggttgcatttggatagtttgactatgatctacccaaggctgtatttatatttatactgcttggtttaaaaaccaacctcttgttaatatgatcaaattagttgtacgatcatgtctctgtgtggaatagtgcttaaatgttaaaaggaaaatgaaataatcctaataacatattttgctagcaatcaagttctgatttgaacatgattaaaactgtagtaggacacttcttgcaaaacaaattttaaaagaatatgccaggccaggtgcggtcatgcttgtaatccaagcattttgggaggccgaagcgggtggatcacctaaggtcaggagtttgagaccagcctggctaacatggtgaaatcccgtccctactaaaaaatgcaaaaattagccaggcatggtggtgggtgcctgtaaccccagctacttgggaggctgaggtgggaaaattgcttagctgccgtgaaccgagattgtgccactatactccagcctgggtgacagagcaagaccccgtctcaaaaaaaaaaaaaaaaaaaagaatgtgctaaacataaagattatacacttacataaatattattttgtgaataaaacatccatattatttggcttcatttgagatccaggaaatgtctttccatattataatatccaaacattcatatccattaagcattgagacacaggtatagaagctcactcaaccatttctgaacaaatacaaaccagactatctttctgtgtgtgcaaagcacatctagatcatttagtcaaatttaattaggtctctcgtgagtttttggttgaaacactaattttgaattcacataagctttagggaagttaaaaataaacgtcacaaatagcattgaaaacatgcggatcttacatattatacatattgagataaaacaaaagaaccaaactctgaaaaggaaaatggtttatttgtctgatttctgtgtcatgctaatggagattattggacttaagtgccaagttctccagacagaggctggagaactaatatactttccaatagatgtactaataaattgtaacacttgtaagatcttaaacagctacatacaatttctgttgtaagttcttcatgtattttgtctggatgtattaactattcaccctccaatatagagaaaatcattagacaaattcatataaaagaaagtatcaatcaaactctatgctttttcagagtatacatggagtaaactattacacatcaaatcacagtgttttataaagaaaaaaatcgcatttttaagaaaaattgaaagcacttacttaaagagacatgagttaataaatcctcatactgctgggaggtcatgaactacgataactgaagatgggggttctcctcagaagttttaagttaaactgcaccattagccacaaatcgtctctagtgtagattctgttagaggaggacgaagcaatggtccagcccgtcctctggctcctgcccatggaaaatcacccactcttgcaacgtatgcccttatagatgaaaacccaaatgcctaaggacagcattaagtccccagcactcaatcaaactgaaaatcaaatagagctacagaagactgagatttctctcgatgagagtaatgtactctgcacactgcacaaagaaaaaccaccgctttgcactcttgatattgacgtcaattctttgactcagtaggagtccatctgccttgtactttaccttggaaaatgatggtcattcttcattaagtgagaatcatgaactaaaactaaattgttaatgtaattatactacaatgaataaaatcccaatttgaaatagcagcatgatttttaatcaaggctaaggagtatgttagtgcaatatagcttacaatgtacaaaaaatatttgccagatattttaaagcaggattgaatgagataaatggtagattcgtcttctgaaaaatagatcaccctatttaaaatcacacatattgctaaaaggactgagagtaatgataaagagcaaagccttttcatatctcatttaatttaactccattcaaagcaacttttcgtatgttacctatagaacctgtgaaacagaagggggaaaaattcccttctttgataaacttttcatcattgaaaagaaatgcaattcaaggttcccttatttcttttgcctcaaattcatattaaatcacagagcaaatattcccctgcattacttactatgtatttcaaaagaaaaccctacagttttgacaaaggattcacatcaagcctgagagaaacagctctcctgttgcttacttaagaagtcttgtctttagaaggaaaataaaacctttctttttctctcaaatgaaggaggaaattattttaatgaaaaaaatcagctctctaccagaatttgaaggccacgcattactcgccatttcattctcctctatttgggcttttcagcatcccaacatgggtgggttccatgctggttgaacacataacatgatctacactctccaagcagataaacaaatatgctgatgtgactagatgccctttgacacactaactattgctctgatgcctcatcagtggctcgcctcagtgactggataactaagtgggtaggacatcatcttgactgtgaaagacatttttcagcagtcaacttggggatggtcactttttatattttaaatatttatcttaaggaagaagtacacaaatgcacatctctagccatgctgtgcttttcaatcacagattttaagtctgagactgtggaggaaaggttagagagaaatggacaatgacgactaataattaacacatcaacagagtcaattacatctacaccactacacaatcattaatgcacctcagaaaaaagtagtccgggataataggactatagagatgataatgatcaaacaagacaaactgtgagaagctttaaggaccacgtttctaatttcctcctagtccaaaggaatcttccacagtagaggctctaccaggaatgtagtaactagaacctggactagtacctaaggaatggtgaacaataaacaggtggtttttaccccaataacagataatggaacaacatcctgataatagctcaaaatctctactcctcagagcactataactaatgatcttatttgatattcataaaaaccccagaaaacagaaaaacaggtatttctacccatttaacagacaagaaaataatccagtcctaatggctaccattcactgagccttttctatgtgccaggcacagcgatgagtctcctccaggcattaacttatcttcccaacaattccagaaggtaacttttattacatttcttaacttactgataaggaattcaaggtgtaggatggtgtcacctgcttaaatgtcacgtgatatgtgaagtaccagatctagagctccagttccggaaggttctggagcttttagccatctcacactgcctcaccccgagaggtccctagcatttccctccctcctatatcctcttattttttaattagtcaataagcaaacagaattaccaagtttagttactgatgttaaaaaaagaaaacctctaacggtttctgaatatctatagaagatcttcacagtgttgcccatggcacaactttaggagcttcttcacaccagattctatgtgaataggaccccatggacttctaccacatgcgggccctggccttctaaaggaagaacaatttaagactatgtagacaagatgtactttaaaaagttaattttaaaagtaggcagtgtgtgtacatggtacaatattcataaagtacaaaagaccacagaatgcaaagtaagcaaccagcaaccccctttctcccttaggaagcagtcattattaccaagttttgtgaatccttccagagagagttcaggcataaagaaacataaaaatatattaagcaataatttaaggacattttagatttagaaaattattaaaaagcttttgggacactgacattagattatcaaagataccaaggtcttttggagtgaaatccagttatttgcaacacacatgatcatctgaatacaggatttttcacatctcttttacttagcacagcagtaacaagaaagaaaatagaacaatatgaggcaatgatgtaactgagagatctaagacaaatgatgaagcatagttaatgaaaagctcatgtgtgtgagactaatagcaaccctgaccaaggatggcacctgttccacactttccaggcttgtccagccagctatctgatgacagttgtcaggattggcttctgggatgagagagctgattggaaaaggaaagatggttggggaaaaagaggaacgaactagttctttgcaaacgaaagggaatttccttctttatcccaccttccaatccaatcacaattcactaaacagagtggggaggagactgctccactctgaatgcctgccatgctcacagtctttcttctgcattgacctcatcactctgaccaaggcaaaaagaatcagggtgggtgttcagcctttgtctgaacaaaggcagggagccatgtagagcctgtgagttgacttggctgcttgtgaggcactgaagagtgaccaactaagtggtaacaaattcctttgtcatagagagggtgaatgtgagacagagagagagtgagtcagcggtttggagcaggaacaaaagccaaaggtcaaatagaggcaaggcagtaggagcaagcatgagtaagcaaaagatatgaggcatccagtgcagaatgaagccagtgggcagcagaggatcaatagaaacagaaacagagaagagctgagtggccatgacatcaccagaacactggataggtgataacaagcacctactactcttgcattataatcaccaggcctgtaaatctcttggtaccccaaacaatgttccaattctctgtgaagtttgccacactagtgactgaggttgagacatcttcctgtccttctccagtcttgtgtattctacaacaaaatttcattaatatggcaggtagactgttgcattggtggccccaggaagcacccttcccagtatccatgcccttgcatagtcaactctcacaatggctgtgggcttggccatgtcacatgctttggccagtgggatttttagcaagcaatatgtgaaaagaggtgtgatgaccatttgcacactgcagcttatcctcttgtaatgttccctctgggaagtatgagccatactactagatgatgagaagccagtggaaagagaccctgggagatgagagaccatcctggactctctggccccagctgagctcccagccaaaaatagctgagccagtgactttttaaactacatgcaacagaagaaccatcctgccaaccctcaggattataagaaataataaactgttgttgtttgaagtcacaaaatttaggaatggtttattatatagccatagatatctgcaataatgaattaagataaactgagattggctctttcttgcaaccagaaacatactaacatgcacatttaggaggactgatgatccaaatgtgcaggtctccttacaaggtcatggccgaacctaaattagtaaatagtgtggcaatgtagacttctcttcaaaactaatctatcctttttggtttttctagatacttctctatatatatgttggtgcagccaaagggcacatacttaacttacatttctcacacaaaacttatagtcagaataaatagaaggtggttaacactgaccattattttagcataaatttgtttatgctaaattattttagcataaatttgtttatgctaaattattttagcataattgtaaattatgcctaatttattgtcttaggcattatactaatttatttctaatgcagaatagcaaagattaaggtagagaacaggatgagagagtccaatattgttagtctatccctcctacttccccatctccgtgaatcatactagaactctggctgaggtcagccccagcttctattcttctcactctcccacaagacaggtaatctggagaaagggaggaaagaggggcaagccaaaccacagggataggcctcttccttcctcacaaagtccacttctcagctgattcccttcacattagaaaacagaaacaaagttccatttaaaaacaaaaatggaaagtaggaaactgctctaaaagtgaggtctgagaaatgaaaatttaattctgaatatgggtcttcagagcaacacattcagaaacatttgtggagtcactgaaacaagctctagctctatttatcttcctgtaaactgagatttctacaaatagcactgagaagatgtaaggattggaaacagtttattaaaaacttcagcaaaaaaggcccttcaggatattgatattctaaacatgctataccttatccacttgtcaagaaagcaacacatggcaaaatggcagccatttaatagtaaaaaatagcattttgaaatgccaggcaggctagtcactttgaaaaatattgtgtcacatttcaaaggtaaaccctgctatgcttgctgaatggtatgaaccagttagggtagggacgcagtgtacaggtcaaaatctcaatgtgtactcctttcctaatgagtgtgaagggtagtaatgcaaggagaagagagagcaggagagagaattaacctcatggtagaagtccatggggtaccattcacattctactccagtgagaaattaacctagaagtctcagtgcttaacataatacaattgatacttcgcctgttctatcatccagtgtgggtgtgcaggcacctctgctcgaggctgacagaggtgccaccattttgtgatgctgccaactcaacaaatgtcttccaaagtccccatgctctcctgcttttaccttcctccaaccagaagtgatgcacacaacttttgctcacaacccattgaccagaagtagtcaatgactccaatcatcagagagtctgggaaatgctggggtgtgggtggaatatttagtgagcactagtatttctgccacggggagcatggcctattcacaatcaatctgaagtgctttttctggaaagagtttcagaagtgacatcctagaggatggccatcttattgtttcatctcggcgattagtcagggagcaggatgatgatgatgatgatgggctgtgtgggtgctagctagttgaagctacctcctctgtcttcctcccagctgcatctatgaatcattcttttctataacttgtgctccccgcaaacaagggcctgagcatgtgtgttggggaggcaaaaggctcagatttaccaaacccaaagggcatcactcccaacatgtcacagattactacaatcttcccagccacatttcaaaatatattttgccaaggtatccaggctctctgtaatcataacggaaccaagaaaatgagaaatagagatggacatgacatgaagaattgtatattccacttgctatcagtgcaggggaaggtatattatcacaaaccaaacagctgaaaattcttcattccagccagaggctgtttcatataaagaacaaatctcagtcacttgctgacatgcatgttgtattataaagaacttaacagcaaaacagcagagtaatgcatgaaatatttaactcctggtgcatttaattttctttatacaggctatgtgaatatctgcctttataaaaaaaaataatcaacgagtggccatttgtttgcaagaaaatttatcaggtttactccaaagagcatccctctcccaagcatttagaatataaatcagtttcttggaagttaaatattaactcctcaggagaccatgtcctctgtgaaaggtaagtacacaaaagcatgaatgttagaaacaatgttctctgtactgtgagatttaatcaacccaacaatttaagagctttggcatattctgctgtctctgctcaattctgctgtctatgacttctcaggaacccctttttctataaaaccacactctcttttcagcatcatttaaatggactccatagaaagaatatattccattgtgatgatttaaaagaaatgtcaattcaaagagcactttaggtagaaatacagcgaccatacaacccacaattccactgctcagtatatacccaaaagaagggaaatcagtgtattaaagagatatctgcactcccatgtttgttgcaacaatattcacaatagtcaaaatttggaagtcatctacgtgtccatcaacccataaatggataaagaaaatgtagtacttatatataatggagtactatttagccataaaagtgaatgaggacaggtcaatagctcatgcctctaatcccagcactttgggaggccgaggcaggtggatcacttgagcttaggagttcaaaaccagcctggataacaaggcaaaactccatctccacacacacaaaaaatacacaaaataagctgggcatggtggcgagcacctgtagtcccaactacgcaggaggctgaggtgggaagatggcttgagcctgggaggcaaaggttgcagtgagccaagatcgtgccatggcactccagtctgggcaacagagccacatcttacctcaaaaaaaaaaaaaaaaaaaaaaaaagaaagagagagatcctgtcatttgtaacaacaaaataagccaggcacggaaatacacacatcacatgttctcacttatttgtgggatctaaaattcaaaacaactgaactcatggaggtagagcagaagaatggtcacccgagactcggaatggtagtgggagggtggttggggtggaaatggggatggttattaggtacaaaaaaaaaaaatagaaacaatgactaagacctagtatttgatagcagaacagggtgattatagtcaataatttaactgtacatcttaaaataactaaaagagtataattggattgtctgtaacacaaagcataaatgcttgaggggatggataacccattttacatgatgtgattattacgcattggatgcctctatcaaatcatctcacacaccccataaatatatacacctactatgaacccacaaaaattaaaattaaaaaaatttttaaagttttttaaaaaagaaaaaataaaaccaaagagcagtttgaaatgtcctcaggtagaagtattttcggccaaagtatctagcctcctagaagagtcagaacagaaaaacctctggtttttattaaagttggttgataagaatgttaaacctagaatgactgcctctctgtgtcttttcagtttaattttcatgggcaattttctgtgagtaaactgagcatttattttctaaagataaatatttgtaccctccggaaagaaatatggggagtaagaaaaaagtgagataaggaggacaaagaaaaagcaaggaaagaagaaatgttgtagaagtaatacatttccaagttatgttgtgtttattcttatcatttttcttcagaaattgtgatagttcacaaataaactgggttaaaatacttacaaaaataatttctttaaatatattaaaggaatcataaagatttcaagaaaactttactagaagatgccctatcagggcttatgctttgaaggtgtctcaggtctgccttcctagactcaacaatgaattatgagagccaaatctgctataatagaaatggagtcaaataatccagccaccaataatgatggttactgagatgccagcacagagggaaaaaccaagaccagaaatgggaagacagctaaaaattagatcctttgaggctgctggttgttgggtctaggcacaagcaggcatgggaaagtgagtaccagccacatggtgctgtctcaaccaagggaagaatgaggtgagcaggccatgcaagtctgcccagtcccctctcagacaggagtgggcttgggcctctcagctgaagttgagcagtggtttctgggtgccatcacttgctgcacctgtgtccagtggggccaagttggataatatgagaggcaacattttggggagaaggtgattcaaaagcctggcagaagtgagctatgattgcatcactacactccagcgtgggtgacagtgcaagactgtttaaaaaaaaattaaaaacaaaccagaaaacagaaaacaaaagcctggcagagcatccaacagaatttacaaatgaaaggattgggtaaagaatgaaattcagggaggtggcatcagaaagagtaccagggagaccactaagactaagatttgagaccaagggatgtgggagatggaatctacagacatcattagagctggatagaataactgcatataatttttatgaggtattgggtgtgggtgttgctcaggaatggggagaataaatggctaaaggtcctgctcctgcgtggtcagctggctgaggattaagcaggcaaagttgggtggtttcttgcctgccaaagttgaacgcacctcactgagcagcttcttaaaaatgtccagttagtctgtctgaggaaggctttccaaatttaggtttctgtctccttcgagaattttaaataagactattgtaggcccttgctagagtataaaacactaattgttgttctccaactcctctcacaagccttgcagagaaaacagtttttattttttgaaagatctgaatgtattctattctattcacatgtactcccaaacctaaaataaaagttaaaaaaatacccttccagaaatagctgcagaaggcctgttaatactcagcaggagcttggttttaacttctgatttttatcaaagttggttataagaataggagatagataaatctcagtgttttctctgtccatttaactaaatcaagacacctagttcttctgtacagattttataaattggactaagccatcagacaagctatcaagcaagatgcaggaaaaacggtcacatttgaaagaagtactttggtttgaactgagagcaagggtatggatggagacgagctgttctctaaacatttctgcgaaaattttgcccaagatggggaagcaattgataataatctctacattgcatgctgaacattttaagtggaaggcaagcctacaaaattgagaagaaagtgcaggctactctgcagaggcaggaacgtctgagcggactttcagaccaggacatatctaaaatgacagaacttaaagggaagagttgtcatttttacttagaagctttaaagctgcagcattatctcagcgtctaaggcacttagagttctttgtaggaatggcttcaaacattttattaacaatatttattggacacccatgaagttttagatgctaggggggattcaaatatgaattcaacataattcacgcccttgaagtgctcaaagctgggcttgggagcaggcagtgagctgtatgagaatataactaaatgcaaaacaatgtggtaagtgctccaccagaagctggatctaggccctatgggagcagaaagtaagatgtatccaattgtgttcaagagggaagaggaaagactctgggaggtgaaacctgagctctaccttgccctggaagagtaacagtaatactccagggagagaagagggaagccatgagtaaagtccaagcgtatagtgtgtttctggcaagtgcccagaaggggatgaaggatactaagtgagggtgatgaggcagaaacgtaaagttggtgcccgttgtaagggggcataaatgctgttattgagttttgtttttatgctaatatcagatgagtttcaaagtgccaagctgggtaagtgagttaaagaacttttctttcaaaaggattatcaagagtgccatcttctcatgcacagagtgaaatgtgcagggaattttagaggattcaattaaatttaactcaatcacctgaaaatcaattatgtacagatggatggatgcctgagactgggagtggtcagagaggagactgatggcaaataggcatgggggagtttttctgagtactgtgctcagcagcagggatgacagaaggttgctggggccaagttacaattatttacaatgacaacaatatactcagcctcctgctcctatcactaccccaaccacgaaaccacaaagctaccagagactgccaaatccctggctgtggcgtccaggcgattgttaattattgttctaaagaataaaagtcaatagtttttcaatccttggcataaaacataagagaatatctcgcaaccttagttaggtaaatttcttagctatgacaccaaaagaaaaaaactgataaacttaacataatcaaaattaaaaacagttgctcttcaaaagaaaccaacaagaaaatgcaaagacaagccacagactatttacaaatcatatatctaataaaggacttgtatctacaacatgtagaaaaactaagaagacaaaacaagtcaataaaaagatggacaaaaatttcattagagatttctccaaagaagatatacaaatatctaacaagcacatgaaaagatgctcaatatcatttatcattaaggaaatgcaaattgaaaccacaatgcgatactaccacacacccacttgaatggctgtattcaaaaagactgatgatgtccagtgttggtgaggctgtggagaacctgaaatcctcacatattgctatggaaacataaaaacatatagccattctgaaaaaacaattttgctttttttttttttttgagatggaactagctctgttgcccaggctggagtataatagcgtgatctcagctaagggcaacctctgtctcctgggctcaaaccatcctcccacctcagcctcccaagtaggtgggaccacaggcatatgttctaccatacccacctagttttttttattacttgtagagaccaggtttcactatattacccagactggtctcgaattcctgagctttagtaatccacccacctggacctcccaagtgcttggattaaaggcatgagccaccatgcccaacctggcaatttcttaaaagttaaacactcacttaccatacaatccagcaattctactcttttacctaagagtaatgaaaacatataaccacacaaagacttgtacgcaaatgtatatagcagcattatttataataatgaaaaattgtaaacagatccaatgcccattaacggatgaaagaataagcaaaatgtggtatattcatataatggaaaagtattcagcaataacaaagaatgaactactgatatatgcaacaacatgcggcatggatgaaacctcaaaactatgctgagtgagcctctccctctccctctccccctcccccccctgcccctcccactttccacggtctccctctgatgcggagcagaggctggactgtactgccgccatctcggctcactgcaaactccctgcctgattctcctgcctcagcctgccgagtgcctgggattgcaggtgtgcgccgccacgcctgactcgtttttgtattttttggtggagacggggtttcgccgtgttggctgggctggtctccagctcctgaccgcgagtgatctgcccacctgggcctcccgaggtgccgggattgcagacggagtctcgctcactcagtgctcaatgttgcccaggctggagtgcagtggcgtgatctcggctcgctacaacctccacctcccagcagcctgccttggcctcccaaagtgccgagattgcagcctctgcccggccgccaccccgtctgggaagtgaggagcgtctctgcctggctgcccatcgtctgggatgtgaggagcgtctctgcccggccgcccatcgtctgagatgtggggagcgcctctaccccgctgccccatctgggatgtgaggagcgcctctgcccggccacgaccccgtctgggatctgaggagtgtctctgcccgaccgccaccccgtctgggaggtgaggagcgtctctgccgggctgccccctctgagaagtgaggagcccctccgcccggcagccgccccgtctgggaagtgaggagcgtctccgcccggcagccgccccgtccgggaggtggggggcagcccccacccagccagccgccctgtccgggagggaggtggggggcagcccccgcccggccagctgccccgtccgggagggaggtgggggcagcccccgcccggccagccaccccgtccgggaggtggggggcgcctctgcccggccgccccttctgggaagtgaggagcccctctgcccggccgccaccccgtctgggaggtgtacccaacagctcattgagaacgggccatgatgacggtggtggttttgttgaatagaaaagggggaaatgtggggaaaagaaagagagatcagattgttactgtgtctgtgtagaaagaagtagacataggagactccattttgttctgtactaagaaaaattcttctgccttgggatgctgttaatctataaccttacccccaaccccgtgctctctgaaacatgtgctgtgtccactcagggttaaatggattaagggcggtgcaagatgtgctttgttaaacagatgcttgaaggcagcatgctcgttaagagtcatcaccactccctaatctcaagtacccagggacacaaacactgcggaaggccgcagggtcctctgcctaggaaaaccagagacccttgttcacatgtttatctgctgaccttccctccactattgtcctatgaccctgccaaatccccctctccgagaaacacccaagaatgatcaataaatactaaaaacaaacaacaacaaaaaaaacaactatgctgagtaaaaggagccagacccaaaagaccatctatgattctacttatatgaaatctttagaaatgcaaaagtatagccagcatggtggttcatacctgtaatcccagcaccttgggaggccaaggcgggcggattacttgagatcaggagtttgagaccagcctggccaacacggcagaacccagtctctactaaaaatacagccaggtgtggtagtgcacgcctataatcccagttactctggtggctaaggcacaagaatcacttgaacccgggaggtggaggttgcagtgagccaagatgatgccactgaactccagcctgggtggcaaaggaagactgtcgaaaaaaaaaaaaaagaaaaagaaaaagaaaaagaaaagaaggaagggagggagggagggaaagaagaaagaaggaaggaaggaaagaaggaaggaaggaaaagaaaagaaaagaagagaaaggaaggaaggaagaaaaggcaaaactatagaatcagagaacagattagtggctgctggggcctggggtaggagaggagactgactataaacaggcaggagggaactttgtcagtcgacagtcatgttctgtagctagattgggatgaagtttgctgttaaaaatgcactaaaactcaccaaactacacttaagatgggtagattttgtggtatataagttatacttcaaaaaactataaataagaaagttaactggaacatcctgtgctttccaaatcaagacacctttcagaggatacattcatagcctttgccccgggtaagtgctttcaaatataatactctagtcccagtataaattcaatatacctgtttctaaacacagagtattaagcgatactgagagaaatggcagatatattagcatatgaatctaaatgtattattgaaagagtggttttaagagaagtgtagacagcagcctactctaatgaaaataaatgtcaatgaaaataagctacatttgtcattttcatgaaaaaattatttctatcatcatctgcaaatcaatttccttaataagggttcgtgacaattttcaggatttcttgaaatgatttttatgatatattaagactcatttctacataaccttgatttcaaatcaaaattgcttttaacttcacattcacaggtatgtgagctattaaacctaagtcaggcagagaggatcagtttcatcaagcgtctcagatgagagcgttcacacccttctcttcttcacgtgccacactgcctcctctttgtctccacttcaccgggcatgctgaggattatgaacacttttcaaagtcaacgctactgacttctatcttcctaagcaaaaataagccaccaaaagtagagatttataaaagaaagcaagctcagacttagtttctgagaagtccatttcctcacacagaggagtctgggtctctgcctgttggaggaggtggctgtctgtgtgctctgatggaaattctgccagtttccttcagcagttaacaccctcagcttcagggccgaaacatgctccaggttgtcctttggctgaaagcccgctaaaatggcaataattccctctgaccacaacagccttgcgtgtggtgctttctcttaattattcctcctgcccctggtccttcagctccacattattcccactctccaaaaattctattcttcacttccttctctttccagcttaggtcccatgggccacccttcatttttctgaccagccctctcaactccttttcctccttctttttacaccatacattcttgtctagggaaagaccccaattcagaacagttttgcctataaggacatgaagcccaaatttcccatgtgacagacccacgtgggggaaaatgataaagtaaaaagaggataggctgttgagtcagagcctagcttaaatcctggtgctgtcacctacaagctgtgttgcattggttatgttcaacaagctctgtgtgccttagtttcctcacctgtaaaacggggctaatttacctacctccggggctgttgagataaatatggaatgagcatagcgatgtggcaggagcttagtggacccttagtaaatggtgacaaaagcctaacaaacaagcactctgatgtccatgttcactgttgttctctcgacccagtctgctttctccactttctacttggttcctatcctccttgtggcctggataacacctacttattcctggagactccactaaaatgtcaaccattagaactgcactgtcaaaaacagcagccattagtcaaatgtggctacttacattcaaattaagattaatgaatattaaaaatccagttcctcagtcacactgtccacaatttgagtgcccaacagccacatggggctggctagtggctactgtgttgggacaacacagcgtggaacattttcatcatcacagaaaattctattggacagagtttctctagaggaaaatgtctttgttaaccctctcctaaagaactcgtgtacttttataagcatactcatcacttcctaaaatgagtgttgattcttttactccataaattgtgaacttcttgaagtaccacttaaatccatacaaatttgctaaatgaactgttgaataattggttaacaagcctttttaaaaatcaaagtcaagtaacaacaggtgctggtgaggctgtggagaaacaggaacgctctgacactattgatgggaatgtaaattagttcaaccattgtgcaagacagtgtggtggttcctcaaagacctagaaccagaaataccatttgacccagcaatcccattattgggtatatacctgaagaaatagaaatcattctattataaagatacatgcatgtgtatgtttgttgcagcactattcacaatagcaaggagatggaatcaacccaaatgtccatcagtgatagatcggataaagaaaatgtggtacatatagacaatggaatactatgcagccataaaaaggaatgagataatgtcctttgcagggacatggatggagctggaagccattatcctcagtaaactactgcaggaacagaaaaccaaacaccacatgttctcacttataagtgggagctgaacaatgagaacacatggacacagggagaggaacaacacacactggggcctgtcggcgggtggagggagagagagcatcaggatgaatagctattgcatgcagggcttaataccaaggtgttgggttgataagtgcagcaaaccaccatggcacacacttacctatgtaacaaacctgcacatccttcacatgtaccgcagaacttaaaataaaatttgaatttttaaaaaagctttttgaaaaataaacctcttaattgtctggaggctcagacaatttccatgaggaagagtgcctgatatctttgctttcagaacctggtcctgagagattttgtctagttttgcttcctattccgtttctcaaaccatttctaatccttaacccattcaggcaagcggagccctccaccacgtggccagaatttcctgacgtccaagaaagggcattaaacaatatggcttctgagaaaacatctaatatcagataagtcattgaatataaaagttcatctctgtactcacagtgccagagtcagtgcctggcccacagtaaacacctaaagagtatttattgaaaaaaatgaatgggttgttattttatcagggactatactcttagggaggaatgaggtacaaggggagagatgctggaaaggatggagagccaatatggaggagtactgagctgccgagtgtgactgattgctcaatccacagaccacactcccaagaaggtggataaatgggagctcagaaccagccctgtgatggagtggggaaagggagaagaacttactcccgggatgtgcttggtctaagattcacccccttgctcctctggattgtgcattccagagcgtgggcattagtggagtctgcagtgatgtcaacatgggagtgttgggtgggagatgagaggggtactggtgtgaaattggctggggcccacacagagctggaacaagagatggggaggccgaggctctggagtggtgcataaacaggtgttgggcacaatgtatataaattagccttttaaattatctaccatcatgggcaggacttgagactggaggataggccatttggggaaggtttatgtggggtgttctcatattcaattcctggcaaggttctaggtacattggaagtatcaataagaatcaactggttgattgcatagaggcatctaagcaggccagtatgatactaggtactaggttcctaaagggggacactgatggaggggaagtgaatgtggggacatgaggagaaatggtggacagaaaggggctgaaaacaaacttaatccactttataattttgtctgggtccaagctgacttggaaatattccctatgtcctctcctttgttctaaaagcacccagaaccccttccgaagtttcttctttaataagatttcctaatcattataaaacccacttaagacccaggtaaaggttgtgctcctaaggatcaataaactcaactttccactagattttcctgaagcccaagcactgctctctttgttttcagcatatatcaccaccgcctaagttaggtctgttgtccagtaagtagatagtatagctctcttttgctccacacattgtctacagctgacaggtatcatttggagaataaaattagcaaatgttattgctgtgtctatttatattttattaatcaacagatttttagcaaattttggttttatctccatgaatcatagacttgaaaggccaaagacactccagggaattctttattttagcatcttctttccaggcaaaaagacaggacatccccattagagttgttgtattggacccctcgtgtgcaccacttcaaagtcctcttgggttgttcctcttatttcagccacagctgtagacacctgttttcctggaggctttgagcagcttggcacaggtgctctaggacagtggcctcaccttgaccctcatagggatctcttgcttcctgccctagccatctctaatcttggttaatagttctagaaatccactctgcactcaagcacaacccagcagtgcaggggagttagtcttgtgagggccagtctagaccagtgaagatctggagtcagtggataaaagcactccatttcatcccctggcagacagttctgaaacacttcataaaccctttcaccagtccactgggatcaaccagccaatgcaatgacacaggcttctgttggctcctcccctcactttcttccactccccctttctgcatttctgctcctgaggatcacatttccaaacaagctacttatgcacaagtccccaaatgctgagccagagactaaggcttgtgcataagtagtctctggctcagcttttgggggaccctaggctaacacaagtggttggcagtcttagattgggtttgcaaaatctcataccctggattcatgctcccagggtgcatcacccatgattggtcccttgatgcacccaccacctccccgacagaaggactcctcaactacagtgatgtggtgtgtgtgtgtgtgtttgatgtgtgtattttttccaaggctgaaataggaaacaggaaagagacattccctgagaacttttgtgcctaccctttttttggttctctcacttgtctcctttatacaaggaggacacagatttagagaggccagataactcatccaagaccacacagcaagaattcaaactagaatttgaacccagtcctgtggattcaaagtccataatctttctacagcatgggaacagcagacaaatccttataagtcttgagcatccttttacttccacatgtactccttgaagatctataggacacactttacataaggcatgacctgtagatgtgcagtttcactcttttctggggtcatttcttctcaggtctctgcatttggtccttctccatctcctttggaaaacaaggtgctgagctgctttcctggctcattttgactctcagtgtaaaaagtgttctgctttgttggctagattttccccttttcttcctccactgggtcacatactttcaccacgaagccttttggcttatctttttattctcctttgcctcattagaagcataactacagactcccttggtgcaaattccttcactctaggcagaagtgcagaagctaccacgtggagaagcatttcccagacatcttcaatgtctcttcaagcttgacttgggggaatgcataggaaggaaggtgaacatcataaacccatggagaccactgacacaaccctcatcttccaaggtgcttggttagagtgagtgtctcatccctacggcccccacaggaaccacgtggatgccctgtggcagaaaacccccaatttcatctcagtctctagattccaggaggaataaccaaatcatattatcttatctgcctgctttatttcactgcgttcatgaaacaccttcacagaaaagaatttcatttctttccttgcctagtgttttttctttttgtgcagaaatgagaactgatgttctttctctccaagtgtgggatgagaataacactaactccaaaggttagaaagaaagaaatcctctgtacatgaatgacacaaatagtctggcctcttcactaacaggtgcaaagggccataagagccaattgcagtgtattgccctaactccgagcttccgcatcaggcagtgctgaaacagggcctgcctgcttcctgccagcgccatctggcaggtgctagtgtggctcagccatgagccaggctgtataattgcctcaaatcatggtggggtgcttctctgaaacccttacccctaccatgagtgcaactgtcacatagaaaccacttaggaagctagaagtcattcatctgacccactccacagagcctggctcacaggcttatgggatgacttaatcagaaagctaattttcatgttgggtgggtgccaccagcaaggaacacatgttagacagctgaaagtgacctgggccaggcctcataccagtccagcaatctgaagagttcttgaacttcatttaccctattatacactcaagtcttcctgcattcagtctttccatattgcattgcctgctgtttttaaaacataccataatattactactatgtttaatactatgtatatgaaaatataatatggctttagcatctttgtttctttttttttgagatggagtctcactctggctggaatgcagtggtgcagtcttggctcactgcaacctctgtctcccgagttcaagcgattctcctgcctcagctgcgcaagtagctggtattacaggtgcgtgccaccacacccagctaatttttgtatttttagtagagataggtttcaccatttggccactttggtcttgaactcctgacctcaaatgatctgcccgctttggcttcccaaagcactgggactataggcattagcctctgcgcctggtctgcatcttcttttctacttcctgtgtaaagccctcttttcatttatctaggaagacatatttaatgctgcattattttatttttaattatgcttatattctttataagctgagttacatgttttcttggcttaatcaaaaaagatactgcacaactgggactatggggaaatcacaaggaccttaaggtcttgggtctcaccaacaacacagattattcttctacctttccttaaaatgagcactctaaaaatggtccaacaaactggaatttcagaaacatcttcatgcttcataccagttgatacaatatttatcttaactggcatcaatcgtttatacaatacctatctttattagtctcctaatggcaacccattgcttcttgtgggcttcttggtagttaagactaaaaacaaagacaatttctctgttcctgtaacaaacacctaataactctctttccctgggttgtcttctcctaaccagaaatcagagcctgtatccagtcttattaattgacctcgttgagtttctaggtttccaattccacgtgttttgagggaaagaaaaagttattctctttttaaggtataaggaaaacacaataatctcaacacctcctcttccctccaacagcagatgaataatagggggtctccaaccggacagaaaatgaatgctgtcctcacatttgtgtaagaggagccgagacatctggatgtgaagccccatcaagtgctcccaggggcaatggtggcacctgtggaacctccaacagctcatggagccccaccttctgaaagatgttcagagctgagtgtgcgggagccgtggctcatacagggctttgggagacagaatcacatttagaaagtaaggctgtgtgacaatacccagggcacattcccagctgtccctgcctttatcgtttgtagggacctggtgctttgcagttctcctggatcctgcataaaccctggagctttgggatacaggctaatggaatatccttgcccctgggggagggctacactggtgtcctcacccttgacttcatggtgatggtggttcaccttgcagatggatcccaatgtccctctgtgagacatagatgatttcacagcacagcttttttggggtctatcctgatctgacccagtttaacagtgggtagagtcctccatgtctttctccatcatctcctgggaaccagtttcacacctgacctctattttatgctttccaaattacacaggaaaatttggcttccttctggaaactcctaaagtgcaaaacactcatgtttttaactgctccatccctattataatagtcaatacatattaagcacttactgtgtgccaggctgtctgtgccaagaaatttgcaaacattagcttactttatctttacaggagttctctgagataggtattattaacatataatggtttgttaatacaaagtttcacagatgcttccagaattcacaaaaaactgtgcacagtgtctttaagaattaactggcacattcataccttgatgagagcattctcttttaatcatgcccttcttatttgccataccatttacaacaaaatacaccattgatgtttagctaaatgaaagctgaaaaagaaaattggtgaatgagaaagccagtggtcatgaaagtgctagaaatattcagcagtttgaatagctctgaactgtgtaaatcatttgaaatattccttcccccacctatgaactgatttttattgtttttcataaattttttctttttttcatagtattaatgtattgtatgtgttttcaaatattttctcatatatgaaaagggccattccacagtgttctttgtaagctttccctcacatcattgttttggatgaggctttatgcttctcaaagcagtgagataacagataacacagaagccatgtgctggcacttctattcaggttggcatggcctcaaccattttgagtcaaatttctgtctagtctagtaggaccatttcctaaagttgtatccatactaggaaggcagatatgaagaaatgctgctatgctaccaatcagaataatgtaggctttggggtcctgggctggtaaagcctgggtatgatggctaaattgagctgttcttacccagatgaggcttatggtcatctgctctgtctccaaaggtaatcagccactgcacatgaggtttactacactgcacacgcatgtgtgttctctaggtaaatttaaatgatattttttggggggaatctgagctcaaagagatagagttcaaatcagatccagtgtcttttctgtctctaggtgcccaaaattgtcataaagagacaatctcttaccttctgagaaatatcagtcattccctgtgactcacaccagcttctatatttagaactgggtctcctgccatctgatgcaggccacagatgaacaggtctcctgccatctgatccatacgccacacttcaggctatgttatccctaagcccaccacatccacttacgattgaggacaaaggaaaaagaaagggccatcatctttatgtgtcttttaaaggacattcctgtcagtaagaagaaagagtctaagattttaccccgctaacaagttatcctattacagttttatagagcagaggacaaaaaactactgggtcaaagacaaagactttattccatatagcaatagcagtagccagagtatcagtaatttcttgaactggttcctaagactccaattattccaatagggtgttataaagagggccacatgacacccacacacacagcagattgcattacatgagagaaaactctgagcttagggaaccagaatcttttataataagcggtaagcatccctccatgctctagaaggaaacactttctctgccacttaaggctacttattatacaactgttattttaaaaaacagctctggaacaaagggcaaccagtgcctctgcttgcaagatgtgtgattagaactatagagaattttctcccaagaatcctttgattttgctgttgccagttatggcaaaaaggcatactgtggctttataatatagcaattgctccctcaataggcaaccacacactttcggtcagggttcttgggcacttggctttgggccttgagaatcccatggtttccaaagagaatgtaaatataaataatgatgtttgattacacgtgtccgtataaaggtattccactttgaaaagtaacttaggaaaaaacaaaaaccccaaaaaagcccacttaaaatttcacacattttttaaaagggaaacggttttattccttacgctttatttgaattggaaccctgcatttaaattttagcatgttgaggttctttagaaaggaaagataagtttacatacaatcccagacagaatataaaaaagactcatcaaaagagaattctaattccagtcaagtgaccctctttctacaaattgttaattaaaagctcaagggtaaaataggacaaaaaacccatttattcattttcagataaaggtcagttcttccatggtataacattattttccctagggcagttatattcatacatagaatctactttagcaaaaatattatctgtttaactggaaatctatacagataattaaattcctgctatctcacacagctacctctagtcttatggaataaatgagtgcacatcaggatttttaattttctcattaatatagcaaataagtaaaattcatttacacggcatttcttcacttttaaagagcaatgtttcctgttcactctgcacttttaaagtgtaaacacaacattcttgccataagagataaaaagactatattctcttcaaaaaagtgcttttatgtgaataaaaaggaagtgtattcgattttgtagaatcatcacaaacagaacttaaaatcacactagaaatagatgctaacagaaagctgttgagtttccttgcaaacaggaaaagaagcagtggatgttccaaaactggggatcctgtcaatggctgggtctgcttagttgtgtgcagtgctctgaaagggctacatcagaaattccttagtaaatgagtaagtgagagtcagaatctaaaggctatgcctgccttggcagcacataaacagacacctcaactgtgcaaagatggctggcataacctctgtgcaagagaaacacatgcccacaaagtattccatgcttctgaaagtgcctaaaagatgtgggtgatagtgtctacaattcccccatcatctcctggctatttcagagtgaagaaatgagcggggcgggggtgggggtgggggggggttggggggggcggcggtggcgggaagaggacatgcaatgagcaagtcttttgcttttaaaatatatgaccacattctctagaggattgttctacagtgttagtgtaaattcagtaaaaatgttgagggaagaaatgctgatggcagcctggtgaattcagtcatgtgaaatccagctcctatgaatggttcaatacctgaaacagtatacaggcatcttcattactcttcttacatgcatggcactttgtgccgggcactgctctcctgctttacaaatattaacttcttttaatcctcataatgaccttatcaagtactattattatcctcgctttacagaagaggaaactgaggcacagtatatgcaggttgttcacagtcatacaattgataagtggcagaaccaggacttgagcctgggaagtatggctttgggctgggactacagggagcaagtgaggcatttacctcagatgcaaaggccagggaggcatcaaaaactcgaatcatgtcttcgtgctgtatttgaaaaaaaaaaaaaagaaaaaagaaactcaacagtaatgtaaaatagccatttgaacaaaataaccaaagtttaaataaagacaggatcagcattgctgatttttcccttttgtctcaggtttcaacaggacttggcaaggagttgctttagactatgttttatcttccagggcataaaacctcctttttaaacatctctcttttcttcatagctctgatttcactttgtaattgtacaaatatagtgagtttgtttggtgactgtctcttttccctctagatgtaaactttatgagaccaggggtctgtcttgggtcacctttcatccaagtcacgcagaaggaagggtctcactgggagggaaaggatgggtgacggggaaggggtccaggtgtcataagaaggtagcgacatgttccctacaggttacacactcgcatatgatacaattctatccaactggaggaacacactgaaaaggtaatgaatacaaagctagatgaaactgtaatgagttatatgcttgaataataaactccattaatcagtcagttaaataatcaaatgcctatatgcccaaatcataaaataaattgggttcaatgcaagttagaatttctttcaaaactgaaaatgggatacagacaatatttcatcctgtagctacaggacctagcttttatcacttttaggagtagcaaggagtaaatgaaattttctagccatgtaaaaggttttggaaggctagaaatcttagcaaagcttccttagacagtaaccatactgtgcttacaggtttatctaattttacagtgcaaagaaacattgcttctttcctttgtgttcattagagttcaaaatgtttcagcagatacagcttccattatcttcacaacctatcatgagcttggaaaataacagctttccctatttcataaatcactcttattcctattttgtaaggagttgtttgtttggttacttgaaggactatcaaattggaaaaggcaacatgataaaagcaatagtttgagactcaaaaataattcagtaggaaagccaatcattgtttctggtacatcctggattctgagttggaactgggctttagggtttgccataagaaaactacctagtgatgcctttgcatggtccctcagtgagagaaaagaccaagcaccccccttcaaggttcccttcttgtggaggcttaataataattcattcatttaataattcacagatagggagagggtttcacagttaaatctgaaacttaaaagggctatttatgctgaatttctgctattgagactttaaatagccaggttaacatagtaacagacttttttttttaagacgagcacctctgagcacacaaataactatactaattcaagatcaggaagtggtctacacttacgtccatagcaacgacattattcacaagaaccgcaaggtagaaacaatccaagtgtccatcaaagaatgaatggataagcaaactgtggtatatggtttccacatacagtgggaaattattcagccttaaaaaggaagaaaattctgatactgaggacattacgccaagtgaaataagccagtcagagagggacaagtattgtatgattccatttatatgagttacccagaatagtcaaatgtgagagacagaaagattcatgcttgccaggggctggaagaaagaatggagagttcagagttactataaatgggtttagagtttcagctggggaagaggaaaagttctgtagatagatggtggtgatgctggcacaaggtgaatacacttaatgctacagaactatacacttaagtgttccagctctttcagaatttgtctagcaggttttctggttttcattagaaaaccccccacacaaagaaaaattaaaaataaataaaaatgagagctatacttaaaaatggttaaaacgataaattatgtatattatgttatgcatattttaccacaataaagatcaaacagctaccagcaagaagtggacttttaaaaattacggtttccaaatgtaacataaaacatatacttaaagatttacatctccacacttccagtaacaggcaaatatgctagaaaagaggctcttaaaaggaaaaaatagtcttctgctaggacacgatggatgatattcattcaaaacacactcctacactgtgcccacactttctcttccatttaggaaggtatattagaacctaacaaagtgaccaggcacggtggctcacacctgtaatcccagcactttgggaggctaacgcgggcagatcacttgagatcaggagtttgagaccagcctagccaacatggtgaaactctctactaaaaatacaaaattagccaggcatggtggcacatacctgtaatcccaactacttgggaggccgaggcaggagaattgcttgaacctgggaggcagaggttgcagtaagccaagattgtgccattgtactccagcctgggtgacaacagtgagactccacgtcaaaaaaaaaaaaaagaacctaacaaactgaccgtgagattaccatagggtaacctgaagttcttaccccatttactttttgattaagtaatttacaaactctggtattttattactgttaaaacttcttgggagacaactcacactcttcctggcataacatatgctgaaaactgttgggctggggtcacatggagcataaactagcaagcaaaatttagcataaacataagtcacttcagagagttcagccacactagctgaacaaatgaagtgattgattttatcccctcaagtaagacttatgagcaaaaagggaaaaagctaaaaatgtcttggtactaattttaactgtatgtaatggaaacctcatttcctattctaaatttataattctgatcttatcaatcatctcagaacagagtaacatatctggatctaaaattactcaagaaggcatttatgccctcctgtgagtattatcttcttgaagagtgaatttcaccactgtttttaaagtatcacatggtcttttataaagtctagtaggaatcaaagttgtatatcgaatagaatttctttattcacattccaatttttgtaaaagatgagatccacattatctgccattaatttaagtaaaaacaccagcaactattggggcagtaactgctctttgctgaacacacacactcctaaagtaggggttagtgcaggctcaccatcatttatccaaaagctctgaaaaatgcaagttttgatgacaaacctgaccagttgacgatctttatttatcccactaagtgtaaatgtttgtacgttttactgaagagttactaatatgtttgatcatagggtactgttctagaccccactgggggtgttataaaacatttatatatgttatacatatttttatatatttatatacatagcaccctatttttagaattttgattttaaaaaggtaacatatatatatcactttgattatatatatttatatatcatgttatctttcaaaaataaaaatactaaaaataatccagaattctatttttttctttattattattatactttaagttctagggtacatgtgcacaatatacagatttgttacataggtatatatgtgccatgttggtttgctgcacctatcaactcgtcatttaagtatttctcctaacgctatccctcccccagccccccacctgccaacaggccctggtgtgtgatattcccctccctgtgtccatgtgttctcattgttcaactcccacttatgagtgagaacatgtggtgtttggttttctgtctttgtgatattttgctgagaatgatggtttccagcttcatccatgtccctacaaaggacatgaactcatccttttttatggctgcatagcattccatggtatacatgtgccatattttctttatccagtctattattgatgggcatttgggttggttccaagtctttgctattgtgaatagtgccgcaataaacaaaagtgtacatgtgtctttatagtagcatgatttataatcctttgggtatacactcagtaatgggatggctgggtcaaatggtatttctagttctagatccttgaggaatcgccacactgtcttccacaatggttgaactagtttacagtcccaccaacagtgtaaaagcgttcctatttctctacatcctctccagaatctgttgtttcctgactttttaatgatcgcccttctaactggtgtgagatggtatctcattgtggttttgatttgcatttctctgatgaccagtgatgatgagctttttttcatatgtctgttggctgcataaatgtcttcttttgaaaaatgtccattcatacctttgcccactttttatgcggttgtttttttcttgtaaatttgtttaagatctttgtagattctggatattagccctttgtcagatgagtagattgcaaaaattttctcccgttctgtaggttgcctgttcactctgatgatagtttcttttgctgtgcagaagctctttagtttaattagatcccatttgtctattttggctgttgttgccattgcttttggtgttttagttatgaagtctttgcccatgcctatgtcctaaatggtattgcctaggttttcttctagggtttttatggttttgggcctaacatttaaatctttaatccatcttcagttaatttttgtgtaagatgtaagaaagggatctagtttcaacttctacatatggctagccagtttgcccagcaccatttattaaatagggaatcctttccccattgcttgtttttctcaggtttgtcaaagattagatggtggtagatgtgtggtgttatttctgaggtctctgttctgttccattggtctgtatctgttctgataccagtaccacactgttttggttactgtagccttgtagtgtagtttgaagtcaggtagcgtgatgcctccagctttgctctttttgcttaggattgtcttggctatgtgggctcttttttgttccatatgaaatttaaagtagttttttccaattctgtgaagaaagtcagtgttagtttgatagggatagcattcaatctacaaattaccttgggcagtatggctattttcaggatattgattcctcctatccatgagcatggcatgtttttccatttgtttgtgtcctcttttatttcactgaggagtggtttgtagttctccttgaagaggtccttcactactcttgtaagttggattcctaggtattttattctctttgtagtaattgtgaatgggagttcactcatgatttggctctctgtttgtctgttattggtgtataggaatgcttgtggtttttgcacattgattttgtatcctgagactttgcggaagttgcttatcagcttaacgagattttgggctcagatgatggggttttctaaatatacagtcacgtcatctgcaaacaaagacaatttgacttcctcttttcctaattgaatacactttatttctttctcttgcttgattgtcctggccagaacttccaatacattttgaataggagtggcgacagacggcatccttgtcttgtgctggctttcaatgggaatgcttccagtttttgcccattcagtatgacattagctgtgggtttgtcataaagctcttattattttgaggtacattccattaatacctcatttattgaaagttttttagcatgaaaggctgttggatattgttgaaggccttttctgtatctattgagataatcatgtggttttggtcactggttctgtttatgtgatggattacgtttattgatttgcgtatgttgaaccagccttgcatcccagggatgaagccaacttgctcgtggtggataagctttttgatgtgctgctgcattcggtttgccagtattttattgaggatttttgcatcgatattcatcacagatattggcctaaaattctctttttttgctgtgtctctgccagactttggtatcaggatgatgctggcctcataaaatgagttagggaggattccctctttttctactgatcggaatagcttcagaaggaatggtaccagctcctctttgtacttctggtagaattcagctgggaatccatcttgtcctggacttttttgattggtaggctattaattattgcctcaatttcagacctgttattgatctattcagagattcaacttcttcctggtttagtcttcaaagagcgtatttgtccaggaatttatccatttcttctagattttgtagtttatttgtgtagaggtgtttatagtattctctgatggtagtttgtatttctgcgggatcgatggtgatatcccctttatcattttattttgcatctatttgattcttctctcttttctttattagtcttgcaggcggtctctcaattttgttgatcttttcaaaaagccagctcctggattcactgattttttgaagggtttttcgtgtctctatctccttcagttctgctctgatcttagttatttattgtcttctgctagcttttgaatttgtttgctcttgcttctctagctcttttaattgtgatgttagggtgttgattttagatctttcctgctttctcttgtgggcatttagtgctataaatttccctctacacactgctttaaatgtgtcccagagattctggtacatcgtgtctttgttctcgttggtttcaaagaacatctttatttctgccttaatttcgtaatttacccagtagtcattcaggtgcaggttgttcagtttccatgtagttgtgcggttttgagtgagtttcttaatcccgagttctaatttgattgcactgtggtctgagaggcagtttgtgtgatttcttttcttttacatttgctgaggagtgttttacttccaattacgtggtcaattttagaataagtgcgatgtggtgctgagaagaatgtatattctgttgatttggggtggagagttctgtagatgtctattaggtctggttgttccagagttgagttcaagtcctggatatccttgttaattttctgtcttgttgatctgtctaatattcacagtggggtgttaaagtctcccattattactgtgtgggagtctaagtctctttgtaggtctttaagaacttgctttatgaatctgggtgctcctgtattgggtgcatatatatttaggatagttaactcttcttgttgcattgatccctttaccattatgtaatggccttctttgtctcttttgatctttgttgttttaaagtctgttttatcagagactaagattgtaactcctgctttttttttttgcttccgtttgcttggtagatcttcctccatccctttattttgagcctatgtgtgtctgtgcacatgaggtgggtctcctgaatacagcacaatgatgggtcttgactctttatctaatttgccagtctgtgtcttttaatttgggcatttagcccatttacatttaaggataatattgttaggtgtgaatttgatcctgtcattatggtgctacctgattattttgcccattaattgatgcagtttcttcatagcgttgatggtctttacaatttgtcatgcttttgcagtggcggtactggttgttcatttccatgtttagtgcttccttcaggagctcttgtaaggcaggcctggtggtgacaaaatctctcagcatttgcttgtctgtaaaggattttatgtctccttcacttttgaagcttagtttggctggatatgaaattctgggttgaaaattcttttctttaagaatgttgaatattggcccccactctcttctggcttgtagggtttctgcagagagatccgctgttagtctgatggacttcccttcgtgggtaacccgacctttctctctggctgcccttaacattttttccttcatttcaaccttggtgaatctgacaactatgtgtcttggggttgctcttctcgaggtgtatctttgtggtgttctctgtatttcctgaatttgaatgttggcctaccttgctaggttggggaagttctcctggataataccctgaaaagtgttttctaacttggttccattctccctgtcactttcaggtataccaatcaaatgtagatttggtattttcacattgtcccatatttcttggaggctttgttcatttcttttcactcttttttctctaatcttgtcttctcgctttatttcattaatttggtcttcaatcactgatatcctttcttctgcttgatcgaataggctattgaagcttgtgtatgcttctcaaagttcttgtactgtggttttcagctccatcaggtcatttgaggtcttctctacactggttattctagttagccattcatctaagcttttttcaaggtttttaccttctttgtgatgggttagaacatgcttctttagctcggagaagtgtgttactaccaaccttctgaagcctacttctgtcaactcgtcaaactcattctctatccagttttgttcccttgctggtaaggagttatgttcctttggaggagaagaggccttctggtttttggaatcttcagcctttctgctctggtttctcctcatctttgtggttttatctacctttggtctttgatgttggtgacctagagatggggttttgatgtagatgtccttttcattgatgttgatgctattgcttcctgtttgttagttttccctctaacaggcccctccgctgcaggtctgctggagtttgctggaggtccactccagaccctgtttgcctgagtatcaccagcgaaggctgctgaacagcaagtattgctgcctgatccttcctctggaagcttcatctcagaggggcacccacctgtatgaggtgtttgtcagtccctactgggaggtgtctcccagacaggctacacaggggtcagggacccactggagaaggcagtctgtccattatcggatctcaaatgcagtgctgggagaaccactggtctcttcagagctgtcaggcagggacgtttaagtctgcagaagtcgtctgctgccttttgttcagatatgccctgccctagaggtggtatctagagaggcagtaagccttgctgagctgaagtgggttctgcccagtttgagcttccctgccactttgtttacacggtgagcacagaaccagctactcaagcctcagcaacggcggacgcccctccccgcaccaagctccagggtcccaggtcaatctcaggctgctgcactagcagtgagcaatgctccgtgggcgtgggacctgccacaccaggcacaggaggtaatctggtctgctggttgtgaagaccataggaaaagcacagtatttgggcaggagcataccgttcctccagatacagtcactcacagcttcccttggctaggaaagggaaatccccctgaccccttgcgcttccccagtgaggcgacaccccaccctgctttggctcgccctccatgggctgcacccactgtccaaccagtcccagtgagatgaaccaggtacctcagttggaaatgcagaatgcagaaatcatcgtcttctgtgtcgatcttgctgggagctgtagaccagatctgttcctattcggccatcttggaagcgactccaataatcctgaattctaaaactcctcttaaggaataatgaacttggactcccattttacagatgaaaaaactgaggcttgaagagtagcagtgtcttgtcaaggcccatatagaaagtaagaggccaagccactgaaagaaggttgtctgcttagaaggcactctttccattataccaggtgacgagaaaacacacccagataaagactatatggtaagagatgagttatttggtgttaatctgagtgggtttcctggcataagtgtagcatgactaaaatcgctggaaagtctctgattacatgaatatgatagtggcagatttttccttgagattaataatagttttatcaattttatttcctttgtttttatttcctgttggtgaaaatatttgacatttttacatactcacaaatctaacagaaccctgttttgtgtttcataattgttgtagtttgtttcatgtgcctttaaacactgatattctcaaagtacaaaatatatgcataaatacagaaaaatatatattttctatctggaagtttgggaattggggagatttatgccctcacccacagtgtgacttatgcaacactgtttttttttggttgttgtttgtttgttttttgagacaggatcttgctccgttacccaggctggagtgcagtggtgcgataatagctcactgtagccttgacctgccgccttcccccatcccccctgccctccccacccaccccacccctgggctcaaagaatcctctcgcctctgcctcccaagtagctggcactacaaccatgtgccaccacagccaactgatttttttttccaatttttgacagaagtctcactgtgttgcccaggccagtctcaaactcctgagcaagtgatcctcccatctcagcctcctaaagtgctgagaaaacaggcatgagccaccatgcccagcctgcaacaccatctttatgctgcttaaaggaggagagtattatttgtaatttaacagctacataaatgtgggcggagtgttttaaagaggagtctgagcatcaatgcagaatggacactggtgtcccacatgttcagctgcacactccgcttcagcagcctggtccaacattcaccatcaaaaacaaatcttaggtctctccaggtaatttttgtatccaaaccatttaatagtgaatacaatgaaagcccagaataaaaagacaccaacagaatcctgtaggttaaaagctggcctgatctcaacatcagtaggttcacagttattttgtttggtagctcaaaataaaattattcttcccaacaggcgaatgaacttagaagcgctagcaattctggctcctttcaccagaacaagctgcaatctgcaataaacaggaagaggcttcatatgtgaggtaaaagcctctcttactccctctctgccaaggacgattgccaatgcagttttgataagtaaataaagaattactggatggccaagaactaccaccctaagcatatccagcagtcagcccatgctattcaattgtgctacaactacctttaaaaagaatgactgaactcacagaatggtaagagttggaatggagacctcccactggacagcaatgaaagatgaaaccctaaatatatctgaagtgaattttttcattgaactgtctcaaaaatcatgatgagattaacctagaactctcatatttagtttctttggtgctactgaaaatagtttgaccgttgtccatttttaactggactgggggaaataacaatgtcattgtattttacataatgaaataaaggatctggcaacacagcgcagctgttataaagaagacacaaatgccaccttaatatgatttcttaaatatataataagctgggttttagtctgggtctgtatgctcactaatatcaagtaaaaaaaatgaattatcttctgcatgaagacagggaaggtagacagggaggcaatggtcttttatgctaaaagctcttaaaagtcaggaaggtattcaatatttaaaaattaaatgatgaaaaacctgttctgaagtcccaacagtttttagatatgggttccttttgtaaaggaaataatctgctgtctgctctttggtataacacaataaatatgataattacttcatataacagcttaaattaaattgcttttgaatgactgtatttgtttccatttttaaatatctaaaaaattataaaatataaatctaccttttcctcttaacctgatgaaatgagcaaaattcaatacctgagtaatttcttgtcttcaattatatagttgtttacatatataacatgaactttaaatatgataataacctaactacacattttataaatgcctttacttttattttaatatattcttttttaatcccaacactgtgggcaataaaaaaacgaatgatgagcattatcaaaaagttccgtgtatagtaggggagataacaggagactgtgccataaattactaaaatacaaggaataaagggataaatggtacaggaaggcatgacgtgctatgagagttcagagaaaaggaagctatcttgagattatgaatcaaaaaggtttcatggcataggaaatatgtgaattggatcttggcaaaaatttgaaaggatggcagaggggtctagctggctgcccaggagctaagggaggggttatacacttggacccaccagaaaggcagggtaaagccccagtggcagttgggaggtggggtgtggggaatggagggtctccagggaactcagagctatcagcatgagatggctgccaagcttggggcttctctgaccatgccagcaggcctgagccggggaaggggcaaagccttggctgcgaacacagttggaagttttgatgggcaaactggatgtaataataaccaaactgggagtgtttcaggaattcaaatgtttggaagatttttgattaaacacaattgggtgaagtaagtgtctgagatttcttccaggagcagaactgccccacagagcagaagtgtaggagcaactgtgggaaaaattaaagttgttatgtcattgccccctgtgagtcctgtctgacataacagttacataaatatggaatagcttaaataacaagcagccatgtatgatcacttatttagtacttctggatgtacccatctctttataaagagtacacaaacttagtagtataacaaagtacagtataaagaacaaaagatattattataccatttctaatgaaaggactaaaattaagatttccaacagagaatgtaagcaggaaaccactgttaggatttctcctgtaaaacacaagttggagcactttactaatgtctgggatgagctgatggatacctcagtgcttatctctctttctctttcatttctctttaaagaaagaaatctatacacattttctttctggagacatgattaccagaaacatataacactggggcagtagcactcatctacctatttttttaaaagaaatttttgcttacctggaacttgctaagaataaagttaacatgcttatttttctatttggtacttggaacaatgttaatgtacctcaaaattttagtgtaaaatcaaatgtattttctatcaagctagacatttttatatattcaaggttttgttgttttctggcaactggccaaagcaacccatttataaaagaaattggtatttctctcctggcagagataagagctctgtcagtcatcctttgcggattgttctctcatgaattgggggcacagggagaaaaagagagaatacatgacagttaaaaacaaatttataactacatacacatctcaacgtagaaacaattagtcatcactagtaaaagacacgaccttcaaatgcaagtgaacttgaaaaacagtagttctcaaactctactgcacactagagccgcctggggagatttgaagactcccagtgcccaggccacaggccctatcaattaaatcagaagttctgggggtgggacctgggcaccaggatttctaaaactccctagatgattctaatatgcagcctactttaaaaaccagtgtttaaaaatgcttctctgttccctactctctaagtatactgactttctgtaatcaaagttaaaactgtctaagaaaatgaacaaacaatgtaagaatgttgtgagaaagtcagctatactgatttcatatcacacatcattaagcttctaagagctaaattttggtggtgggaagttggttttagaattcttcagattgttagtgaaagactattacataactgtctttagtatgacctaacagttgaatttcaaagtattctgcaaatatgatttgtgtgctttgcaactaagcagaaagtacaattacatgagtgatcataatatttggtagaaagtgatttgtgtcacagagatgtacagaaaaattgctatgattgccaaggaaagggagagatgaatgccagattagtcacaattgaaggtgatgccatctgatgtggactttgaagcacttgttccaggaaaggaaaaggagcaggagatgcgaatgaggggcacacgtgggaaacagaatggttcaattcgacagatgtcaggagtaaaaggagataggtttggaaaaggctggatcacttccaggagggtcctgaatgtctaagtctgaggctcctggtacagagaatgatattatctaccgtggtctcacttggcttttctgcagtgtgtggcactgttgaccccttgctaccttcttttcagtgttccactccctttggttccacaatcttccttcacattttagctcttgaatgtcccttttccagctccccttacaattctcttactccattcatcctgtatatgtcactcatttccaaattcttgttttgttttgttttttgagatggagtctcactctgttgcccaggctggagtgcagtggtgcgatcttggctcactgcgacctctgcctcctgggttcaagtgattatcttgcctcggcctcctgagtagctggattacaggcacacaccaccaaacctggctaatattttctattttttagtagagacggggtttcactatgttggccagggtggtctcaaatcccagcctcccaaagtgctgggattacaggtgtaagccattatgcccagcctctcatttccaaattatatcacatttcttaaatgtctcttgtccgaaaattctattctactttgtctttgttgttcctactataaacatctgatgtttgaactactctcatgtgcttggactccaagctgaaacctaagtcatccacactcctgtctcctccttctccctcaccgccttaagaagtcacccagttcaggtgagtctctcttctcaacctcttttactttctttatttaggtgttgcaggccagacttggataccctaaaaagctctaacaaggttttctgcctccagagtcagtaccctccagtccattctccacacagcttccagagcatctttacaaaaccttaatcacatgactcctctgctcagggccctgcggttcccaagttaatgttcagacttcctacttggcacataaggtcccttatgatttgacacttgctcacttctgtgtggctcacacccctccccttctcattctttaagtctccatcctctccctggaagctttttgagactccctgttctgagacagatgttcttcctctgtgcccaactcaaagcttatacggaaccgcaactgttagtttacttgtctgtccccaggaagtgattttcactcgcatagacatacattagaaacccaccctacttcactacacttgtttacaagtctgtctccactgggagcctgtaagcacctcgctggggagggcaggacacacttcttgttctgctttgtgctgcacgcacttagcacagctactggcacataattagcactccagcaaatgaatgactaatcagagttgtgggtagaagggctcattcacctactccttgaatgactgaagcagcaatgtgaacaacagacgggtgagactttgagagaggagaggaattagatgctattacgaaaagtcaggagcaccaatgcaattgatggacagtgttctcttattaaatccattggcttgtctagctaaaccatctgagctctaagtccacccaatggctttattcctcagtctcctccctcagtctcagtcactgaataacagattgtgtcatgtcttccacatgcctgcaagaacaacaacaaaaagaccttccaccctttcctgttcactcacttccattcctttagggcaaaatactataccactaatcctcacaggaatagctgtttgtatttaattgaagaacaatgtgcatttattcacaaatacaggtactggctctatcagggggtactatcagggaatatgtgatgggtttcaatctgttttgaaaaaaagctttacaatagttttcaaaatggatatttgatctggtcagtcttagtcctaaagagaaacaacagaattcccagtttgctcagaggagacaatggatttcccaaggataacagactaactagggtagggggaaggattcaggtccaaactgttaatggggcttgtttcagtgaaaccttactagaccagtctctccagactagtgtcttgattgcttcagagacagaattgtctaaaagcattgggaagctagaaacaaaactcctttggacaaagttatcattcactatattttgtcaggagttaatgacatgatgagaagagcagagagatggatttttgtctgtttgtgtatacaattatatcagaaactccaccatctatctctttgaaacctcccatccacatagttaccttaggaagctcaatatggattctagccctgctactacagcttctaccacaaaactctcctttcagagctagcttcaaaaccaaattaaaatgcacatatgtttcattccttcagaatagtagtcagcaaacagtttctggaaagggtcaaaaacgtatgtatggcttatagtaggctttgtaagccttatagtttctgtcgaaactactttgtcattaccacatgaaggcagccataggattaaacaaatgcatatggctgtgttccagtaaaactttatttatggtcacagaaatttgaatttcatgtaatttttcacatcatgaaatattattccttttttctttttcaacaatttaaaaacataaaaaaatttatggctcaaaataggaaaagggacaggtgtggccagcagcagtagtttgcaatccactgtgtagagcagtatttataagccttatctgctagcatggtgttggtcgtgaatgatcttttcagaaattaagtgcatcctcaataaatgaaaatgatgatagagattcagtgaaatgattcctttatgtagaacaatactcactggaatgaacaaataaaaataaaaaggcgaacaagtaagagtaggggaagaagaaagcggaaaaaaaaggaaggaggtggaagaaaaggaataggagaaaagaaaaaaagatttgatgtggaaaaggaagtatttattgaatgattaacatgtatcagccattcttctaagtactttctgtaccttactttatttaatcctcccaaatcctgtgaagtaagtgtttcccctcccattttgcagacacagctattaagtggaagaaccataattcagacacgatcaggcacgctcagggtggtatggctgtagatagaagaaccataattcaaagccacgtctgtgttactccatagcccacagtttttccattccactttaatgtccgtagaatcagatacgatatttttattatgtttaggcacatcttacatagtgaggttccagtacattgagtttttaaatcttaagaaatcctaaacgggtaatttttataaggcacgtgaaagaggtttgtttattcaagctcttctaagtatactctcttgatctttgacagtcaacaaaaatatacactggggaaaggacactttattcaataaatagtgcttgaaaattgaaaagccatatgccgaagaatcatactggacccctatttcttaccatacacaaaaattaactcaagatggattaaagacttaaatgtaagacctgaaactataaaaatgctagaagaagatataaaaatgaacagctataaaaatatataacaatatatataaacaactctaaaaatatggaacaactataaaaatgctaagaaaaactcttccgaacattggtctagtcaaagaatttatgactaagtcctgaaaaggaaacacaacaaaaacaaaaatagacaaatggaacttaattaaactaaaaagcttctgcacagcaaaagaaataatcaacagagtaaacagacaacctacaaaatgggacaaaatatttgtaaacaatgcatccaacaaaggcaaaactgatccagaatctatgaggaactcaaacaactcatcaagaaaaaacaaataatcccattaaaaagtggggaaagaagacgaatagacattttgcaaaagaagacatacaagtggccaacaaacatacaaaataatgctcaacatcactaatcataaaaatgaatatgaaaaccatttgtgtcatgacaataacaatgtcaccaataacacatgagataccatctaacacccagtcagaatggctattattaaaaagtcaaaaaaacaacagatgttggtgaggatgtgggaaaaaaaaaagaaacgcttatacactgttggtgggaatgtaaattagtacagcttctgtggaaaacagtaaggagattttgcaaggaactaaaaatagaactacctcttgatcctgtaatcccattactagatatctacccaaaggaaaaaagatcattttatcaaaaagacacctgtactcatatatttatcacagcactattcataatagcaaagttatggaatcaacctaagtgtccatcaatggattggatttaaaaaatgtagcgtatatacatgcacacatacgtatacacataaccatggaatactactcagccataaaaaagaataaaataatgtcttttgcagcagaatggattgaactagagaccattatccttagtgaaatgactgaaaacagaaagtcaaacaccacatgttcttactttcaagtaggagctaaacaatggatacgcaggaatatgcaaagtggaataacagacattgaagactccaagaggtgggagagtgggagggggatgagggatgaaaaattacctattgggtacgatgttcactattggggtgatgcgtaacattaaaagcccagactttaccactatgcaatatatctgtgtaacacaactgcatttgtacccctaaatccataaaaataaaaatttttaacaactgcatatattggcaatggctactcaaaggtatatggaaaatgtacatcagtgtagtattttgagaactgtaagtaaactaatgtacatgcatctttatatgccaattagtttagatttaataagaaacttatgttttagctcacttctcatcaattcatacgttattgcatacccctatctttatttaacagcatattttgttggagacacaaatcctttctcaggttggtagacagtttaaattacataagaacctgtcccacttctatttaaatgcttcctagaatatattaacaattagcaggcgggagagttctccattagtctttccagtaacagtagggaaagtgttttctcccaccaaaaagaaaacaggtaactaaccatatagaccatcactactgaatttgtttgtgatttttatttttgaagcagatgtaattttccttctttggaggagatattattcatttctttggctaacggttatgatttagaccttgggtctcttttattacttgcaatggcttttctatatttttatttttctgagggtggggtagggggttgaagatcagcctgattggaatagcacatgaattgaacggggctgaaacttcgctgaaacaaaagttatctaggacttggagcgatcacaggatacaactgtctgtttcaaatagaaatgcaaaataaccattggaagagttgaaatagtatgatcaaagaattcggtattccattaaaaatcctttatacactaccaacagtataaatagaaaacatatagataaattctctgccttttaagtgtagtcatttaggtacttgaagcatgtttgtaagccttttttaaagctgacacaaaattgtgtatatttaccatgtacaacatgttttgaaatatatattcattgtggaatggctaaatcaagcaaattaacatgtattatctcacatagctgtcatcgtgtggtgaaaatacttaaaatgtattctcttagtatttttcaagaaaactatattgtttttaattatagtcacgatgttgtacaacagatctcttgaacttgttcctcccatctagctaaaattttgtaaattttgactaacatctgtttataagctttttaagggcagaatctttgactcatctttctcttttcaagactagtagtgtcatcagtgttgggcacatgggaggcactcaagaaatggttgttgaattaaatgccatcaatacctatgtcacagaaattcaggctttatttaaagccttatctagattcctcactagcaagaatcttgacttgtaatagaaaattattctaacccactgggttctgaacatgaggtctccagacccccagcatcagcataaactggaaacttgttaaaaaggcaaattctttggacctaccccaagcccactgaatagaaactttggggctggggactagaatctgtattgcagtgaatccttcaggtgattctgatgcacactaaggtttgagaacaactgtaatataataaaaaatggtactgtgagtctccttcttttcaaaaaagaagcccatgaagagaaagagattccctacttttggagcaagcctatggtgttactaaatataaacttggcaggttaaataataactaggcttatacattaatctcacaaatttcaaaggctgcatctcaaagccaacaaaggttaacattcaatgttagctaaatccaataaatttgtcagttagaaaaataatactgtcatgagacgtgcatcctttttgcctttcctaatcttcttgcatactatgtgggcattaccagtagtcaaattgaaagaataaggactaggaagacaaactaaggaggaaaaagcagaaagcaaaaaggatcatctgcccttaaaatgatgtgttgggtgccgtattttcccactgctgaccaccagacttccttgtcctgagcaaacatactactactgtacttggtttaactcattcagatgggaacaacaccattcttatctgacacaaaagctaaaaaccattttcctcaaacatttaaaaaggaatcatttagatccttaaaaagttgaatcagcaactctcagagaaggacagagctgggtcaacagtacagtacaaagcaagcatttctactctttgtgattacaactatctaaacatttccgacagatttcatgtggtaatgtttttctgaatgccattttacagaacttaaacaataaagaattaaagttaaaacttgaaaaagataatcaaagaaaatgaactgtaatcgttttttagaagctaaattgcatcaacatttgactatccattatgtcttttgtcatttcagcattatgtactatcattatctattctttcagggttctgaaaaggctttagaatctgctgattgtcatcaactcgctactgtagcctcaaagctctgcagcactgctggaccatggcaaatgtaaaaaagatagttaactattgcaaatagggtttctgctgccagataaacagcattacaaagctggagttaagagtgctcacatctgggcactttcagagagaaatctttcagagaaaatgaacaaaaccacttgggattagtcacatttccaatgcgaaaaccggcgagtccagaatctagtcactcagtcgttgacagataaaatatagaagatcaaaagaaaagggctgcatttctgggcaactccttcctccatataacctcaatccaacaccaaattaatttacatagcatgagtgttctgaattaaacatgccatggaaatattttattatctcctgcatttactttggataaatactacttaattggactcccttctgagtaattcaaaatgcactatctcaatgggaaatagaattagtttcattatgcaatttattttttagttaaaaatagccagcgaacaagcaaatgcttagaggtcatatgcctgatgctatataattagaaaaccagagattaatacagtgtaatgactggcataacaacatagaaaaagacaagttgattttaaagagtttgtactttctcaaatgtgtctttcttgacaggtaagcatgagtcaggactggctaacgatagttatcactgactggtttttaagtatatttgttatgtatgtatatacttaatgcatctaaatgaagacagtgatcaatgtttcttttgaccgtgcctgaaactaatatatcaccacaaattctctaagttacagagaacaggagaggaagagagacagagcgacagagagagaagagaaaagaaagtatagaggaagagacacaattttattactccataagaggagttgcaacctgactataatcttaaactaaaacatttaaaaaaaggatctgaaatctaaatggccgtaattttctgaaagaacactgtggtgttacacaaagacaacctgacagaaatcagaaagtctttgtttccaattagtttagtggtctcaaactcaaatgcctaagggggccaagcagttaaagctaaagaatacagctgtgcagcggaggaaagggcactggggccccgcttaaacagtgcagggtgctgctactcagctttagctgatagtggtcagggaaatatacacccagttttgcagatcacttcatttttcttttagccagaaattcaaacttttatatgaaatcaactgttttttaaaatggtaccaactaatttaaaagtgctatgtggcttcagggctctgggtgtaagaaatacatccagggccagatgctgtctagaccttgcatggctactaagtagctctggtccctttgggactgtttcctaatcggtaaaataatatgtccaagtttctgttggcactagatgcttattctggtccttttatgtagcacatttctttacttgtgaaaaaacggtttagatattttaatttccagtgttagaatactgaaacaatatcaaagtcagaaaggataacctgaaaacatggatgcaattgaagttttagagacttgcttactaactcaggagtatgttttatccacaaaagtttgtgttgttaaatatgtcacacagagttaagtaaaaaatcatcaaaccagtagagacagcagtttcaatttttgagaggcaatgcttcctagtggtcaagaatacacactggaaccagtctgaccttggttcaaagcccagctcctcacttactaactgaccttatgcaagttacttaaggtctgtatgcctcaatttcctcatctgtaaaaatggggatcacggctcctatctcatagggttattacgaagtttaagtgagtcagtggaaagtgcttagaatggtggctgacacagagaaagcattaggaaaaaattagctgttgttattttaactggcgtaaaacagctgagtgttaaaagcacaaatgaatagctaaatccagcaaatctcctacactggttgagctagcattttactgtaaaatatttaaaagacattaaacccaatctttatctgatgaaggcccaaatcaatggtttgctaaaatccatttacaagttactccactggtaacttgtaaatgaagacctaacatgcaacaattcatagaaatctaacagaggtcaacccagaaaacgggggtcaatgcagtggaacaggggccatggaaaatcaaacggtgtgaatgcctcatccttggtttccacccccttgtgattaattaacagccttactgcatccacccaccagctgtatcctagctcataggcctgaccccaactgaggactacaacagtatcatgaaaactgtgcttctaattgtccagcgggcgatcacggcttggctaagaaaggctcttttcactcccctcctttctgattaactagatggctttataaatcgccttaataagttcatttgtgtaacccaaggctagctgcccttccttcctgctgctaagagggctcagctgcttatctttggatatgacccatcagaagagaattgcaaaaaaacatttttaaatctgctaaattgacaagcaacgctgatctcacgtctcccctaatttagtcatgttttcctacgtcataaaggaagtctaagtgcaggcagtacactgtgatactggcagaaatcttttgtagattattttaaaacccttatgattgtctcctaagcagtaaatttgataactgccaacaggactgtgtaaagtaactaaaattcacagacatttttatcatttctaaaaggttttcatatgtattatatcatttagtcttcaccaaaactctgcaagatattattattattcttctctttttacaaatgagagatttaggctcagagagcttacgtaacttgtataagatcacattattactgtgagttagataccggcttgatttcaggtcttctaattttaaactcagggctctttccactatcacacatgtgctgattaattcacctattgtcttttagcccacacctgttcctctataccttatactactggagccaggagtttgcaccctaaatttctcatactcttactagttgtctttcccttgggttctgctaattggaggtactggtgagcaataagaaagcaggataaagacaaaagattcttggttctgaatcttaaaatgaggcagttgatggcaattgctgtaggagcagtagggttgatgtgattttgggctccagcagcccaggaaaagccagcactttctttactggtttttttttttttttttttttttttttccttttttgagacagcagctcttgagtgaactcacagtcaaactcaagtgtcaccaacccacttggactttcaggaacaagctcatgggctcctgcccagaagggctaactgcttcgaatctggggatcacctcttcttcctttatgttcctccaacacccctctttctccctgttgcagttccagcttttccagtatatttccttgttcaaaattcctaaagtggcttccattttcctgctgaatgttgctttgcacccagatggaagtcaaggatattaaaagggatataaagcaaatgacactgtccctgccttgaaggaatgtgtaattttctagatgatagaacgaatgcatttgaaccaagaataaacaaaatagacatatccaagggcttaggtaaattgtacacagactacttgtgcaatgggaaggaaaatgggcacttcatcacaaactctatttgtgtgctgtgaggagagggacttgcatttatgttttgcctttggcatgcagtctagtctgttctcagtggatccagaagcagccccttgtctagctcacccttacggtcttccgaatcacttccccttttttggacatgcttagtttatacttcctgccccgcagccatctctggtgccaagttgtctgccccattcttgttcagtttcctgttcattaacttctggctcattattacattagtatccctaaagtccacatttgcatcaccacacatgaaaaacgttttgtctatagcaaaaaggggcacagtgatgacatatatgatttggtacagaactactaataacaacaggggttaagaatgggtgaaaaagtgattaaatgatgaagagattgtcaagtattttgcagccctcattaaatctgttgattttgtatttttcccctaaaatggaagaattctgtgtcatttgggattaagttttatttaattttaaaatgacaactactctttacagagggctcgctctgtactaggcacttttcatatgttaacttttttacacctctctaaaatcaaatgttctatagatgagtaaagtggggtctacagcagctaagttacttctccattctcttagtctattcaggctgttataacaaagtaccataaacagggtaacataacagaaatttacttgtcacaattctggaggctgggaaatcaaaggccaaggtgctggcagattccatgtctgatgaagacctacttcttggttcacagataatttcttgctatgtccacccacagtagaatagggcaagacagctccccggggcctcttcctaaaggcactaatcccatccaatagggcttaacctcatgacttaatcaactttcaaagacaccacatcctaatgccatcacatcagagatttaggcttcaacatatgaattttggggggacacaaacattcacctcatagcattcattgtttcttgttattggcaaagccaagactcacattgtctaagttatttgacttttgagtccgcagatgtgaaaacagtgctaaacagtccatcttcatgagtggagaacagcatttgtgacaaccaccaaagtacctctgtggtcagtgtcctcaaccagggcacagcatcatggaccagagcctctgcagggcacagaggagtggtgaggaacaggggctctggagcaaccccacttccctctgctttgtatatggggggttctgcacatgactgcatttgaaaagggcttcactgcgcttgctgaaggagtgcacttgagctagcggagagttcccagagggtgtctggaagaagcaaaggctattctttgtttcactcagttatagatggaagtcagacacttctgcctgaagtactttcacacactccacagtcttaagaaggatggagaaagcatgccaactactcagagaaccacaggtgttcaagcaatggtatccttttatccctacaactagtggacaaagtggggcctctgtaattgtgaagctaggaaaacttctctgtggtctcttccaatcgtgcacattttcttacacaggtactggcctttacccctctcctcagctattaatatcctaatatctttgcctagaaagaactgaagtagagccactaaagtattacttatggatgaaacctcagaggtttcatttcagcaaggatcagagcagaaagtccctggcacatggaagaatatacaggtgactcagagcgctaatgccatgtctgatatgtgactgaagcagtagcaactcaataaatatagaactgaattaaggaaaccaagcctaggaggagaagttcaggcattagccagcaggtcaggatggtttttggagggagggggattgtagggggtcttcataccctgatatcaaatatgaatgcagggtctggatcaggtcttgagaatagatattttttactgtatgaataagaaacatgttggctttaatgttagtactacaaaacacagaccctgtaattagaaggccattaggaacattgttcttattcatatgatctcttgtgcttttacaactggcaaattaaattaattattaaaagaaaaatctctaagaaacaaataacgagaatccttctccccaaataatccgtttccctataccattacagaaaatgatgtcactttgacagaattattaatgttatttacatcctgagcaatgcattcttttaacccgaaagagggtactaggcaaaaaaattaatttctttgagaacaagcatttttacttaaaatatatgtggctgtgtcgattaagagcctcctctgtgtcagtgccaggcattagtcacaagccaaaggcccaatcagtctttgtaaacttatgatcggctttcaaccccacaaagcctgtgtttgtcagtaggatacttgcttctccaactactggttaaaggatcagtgacatacttcaaagattttgagaacagtttctgttctttttgaagagtatttattctctcaaaaacaaatgctagatttgttcatttggtccaaaaaatgagaggaacatttcttttgattgttttccaactctacctccgcattttaacaatggaaagccacaataccctttcctcctgctagcagaatttgtgagtaagctgagttccaaaaaaatgccatttctaaagctttagaaatcagggtgtcacagaaaattaaagcagcatttaattagctaacaacattatctgacaaagggatgaaactttcattatctgacaaagagctgaaactttaatgtttcataagtcatcattcattcattcatttgttcattgagcaaattaagtacctattacatgccaggcagtgttcttggtgctgggatacattcatgaacacaatagtccaaagtttctgtcctcacaaaccttacattctaaagggagggaaacataaaaaaaacaacaactgcaaattatatagtttcttaggtggtattacagagaaaaaaaataaaacaaaggaaggggtacaggggttccaacatgtcaatgtgtgtgtgtgcatgcgcacgtatgtgtgtgtatatgcacatgcgtaatatactttcttgccacaggttcaggaaataactcaccagaaaatgatatctgagcaaagacctaaagaagaagcagcgagctatggggatatgtgcaggaagagtgttccagacagagggagcctcggtgaaagaccctgtggtgggagcatcctggcttgctcatggggcatcaaggaggccagtccacctgcagcagagtcaggacagggctttggctttgtacaagcttaattaagacaaagaaacagtaaaacacccagaataaaacactttataatctggagatcattaataaaactaaatacggatttaaataaaatccacgttgcaaagctatactttattaccaataatcatattaaaagaaacaagtacatatttaacatgatcattgtctagaaggcattactgaaattattataatctaagcaggtgggggatatatgaggagatagttttagggtgtgacaatgtaaggggctcacaggacaggactcctctatccaaaacaaccccctccccgccaaaaaaacccgcagggcacggtggctcatgcctgtaatcccagaactttgggaggccgaggcaggaggatcacaagggcaggagatggagaccatattggctaacacggtgaaaccccgtctgtaataaaaatacaaaaaaaaaaaaaattagccgggtgtggtgctggacgcctatagtcccagctactcaggaggctgaggcaggagaatggcgtgaacccgggaggcagaccttgcagtgagccgagatcgcgccactgtactccagcctgggtaacacagcgagactccatctcaaaaaaaaccaaaaaaacaaaaaaacaaaaaacacaccaaacaacaacaacaacaaacccaaaccttccacatggaattcttctgcttgaatctaaggatttaaattttccttcctttgtctctcttcaagactatttatcttccagattcttttattaaaacacaaatacggggccaggcgcagtggctcatgcctaatcccagcactttgtgaagccgaggcgggcagatcacctgaggtcaggagttcaagaccagcctggctaacatggtgaaaccctgtctctactaaaaatacaaaaattagctgcgcctggtggtgcatgtctgtaatcccagctacttgggaggctgaggcagaagaatcgcttgaacccaggaggcagagtttgcagtgaaccaagatcacactactgcactccagcctgggccacagagcaagactccatctcaaaaaaaaaaaagaaagaaagaaagaaagaaagaaaagaaaagtaaaaaaaaaaaaaacccaaaacactgggtgaggacgcaaaggggccagggaaaggagtaaaaagtcacatcaaagcagctatcagtaaatttcttctgagaagcagtagttaccgagctgcctttgaaatcctgtgtgaataaaacgtggctcaagttcctgggtgacagctctaggaaagaagaggtggcatgggttgaggaaaaggtataaaaagtgagctttcattaccacgatttctattactgtggacaaaggtcagacctgtgagcaaaccacaatgacactacagtccaagaattttttttcagatagaatcagtcatataaaagataagaatacccaatgtaatagcaggcaagcattcctaaccatattatattgtttggtctggaatttgtttttctctttctgttgcacctatttattctctgcaatgcacacaaacatggaatagatatttagagccacatgtgcagtgcaacaaccttgacagtctttagatttattatttgatgtgaacgggcagccgggtaataactttgacttccatatgagaccttatttgtcatgtacatacagcacattgaccagaagtctcaaggccaagtgcagctcttgtgaactaattaagcattctggtgggcacattttgtgtccaagcagcgatgtggtggtgaagtacatgaactctggaattagactgccttggtttgaagccctgctctacggtttactagctctgtgtccctgagtgatgtaattaacactgtacctcgatgtcttcatctataaaatgagtataaataacaagttactgtgaggatgagataaaacatgtgcagtacttagaacatgtctagcacatggtaagcctcaataaatggtgactgcttttactacagtagaacatatggttttcacaacaggtatcactaggaatatctaagcctcctgttaagatattactgcctacatacaaatgtaatccttccccaaatttctgttgactttttttttttttttttttttttttttttacaaaagagcaagagaagagagacaaagccctgatattgaaaaaacactgcttagggcatatttgattattcgcaattgttattgtaatactatgctaattttaccttattaaatattgaagaaggccatcaccattgggaagaagttaaaatatattatataaaattaaactaatttatctttatgcaataaaatgttagaggataccagatgctatttttataataaacatctattttctaaaaaggtcattatgtcatgcatacacaaacaaacagagaagcaaaagagaaatgcatccctgggtaagttgagatccttctagaaaacattttgcctccatgttgtgttaaactagggacaccattgaaaagactaagtcaaatttccaaagaaaaatgtcacatgtctatcctgttgaggcacataggctaggtggaagtgtaaggtaatgataaaggcatcaggcaaaatttgtatcagatctggctttgcaacctggaatttctccattttttttctaatttattgtgacattaaaattatggtgctcatctgggggcagtaaaatattttatgacttaagagaaactcaatcttagaaaagattatttttaaattcaaatttttgattaaaatatcatactcaatacaactcaataacagaaagctttttaaaaaaattacgtttttttaaagcttttcttaaaaaattatgttttattttacgttttattcaggaaatagaattacatttcattgaatcaaatttttgttaaaaatagttctttaaaaaaataaaacagcaaactacacaacattctctatattctataaatagaagtaaaacactccattataaggaagaccattatgtaataccaaaaaacaaagaataattttgataataaaatgaatttaaattgtaatgaattctctaacataatctgcaaagaattctatataatttgaacaattttaaaatactgttattgcatatctgaacaaagatttcccattccttttaccaggaaaagagttaaggacagacgattaatgtaatttcattacagatgccaaagtgtgttatctgccagtcagattcagaacaatggcaagcaaaatgtggaaatgttcttttccacagacaacatttacagaaattaaaataagtattaagtggttttccagaaaataggttccatgacctacacagatttctaggacaacagcaactaatgaagaattggtaccaggcacctgggaagtcattagcaccaacaaggcgtgaccggtatgagctacagaagaaaacaggcagggtgcccccatgacaccaactgcatgacctctgaccatcccatctcatgtttctgggaaaaatttttaaagtgccaactcaggtgtttcagattttttttcttttgcttatcctatggacatgagaagtagaagggaaattagataattttgctatttttgaaaaaaatatggctcttttccatttgattgaatggaagatgaatggatagtggtatgggttttgattaaaaaatatctaggggctcaaaatgaaaaatttatgaatatgaattatttgggcatttaaaagtatgatttggtgcattcattatggtgaatttgtgtataagtacatacgaattccctctgaggccaatacatcactttaggacactatttctgagacttgcgactcagctttgtacatgctctagggttaaatgcctttcatcataataaatatgaaataattattaagatgaaaatgtttcacagaaatatcaccttaaacatgtggcctgtgtctaactgatcaccctttctaaatagtgaccaaagtacaaaaaaaaaaacccacaacaaatcaacaacagaaacaatgcagctctttccccttatatttcactcaaatttgtctgcttagtaataatgacatattgttccgtgttattgcttcaaaaaatgtttccagtgacccttgggaatgctatgtactgttttccttcatttttgctcttggcaaaattttcttcattcagatcactctttgagaaaataatttcagtctgaattgtgcacattctaggtccctcagttaatataagtttttgaccttttggtttctacagctagttctcttggagatgactgatggcatgaattctacttgcatggagtccccgagaaaccactcctcttcttcaaaaaagtacactaaatctcaggacaaactgggatgaccagttatcactgctgccaaccctgttttgtgaattccatttaagatgtccaactgagaacaaattatgtctcaaataagattgtattcacagaatgatggaactaaagttcttggtaaatttaaacaaagtgacagaaggcaaggagctactgtcctcctcaaggggcaacctgcttgactcccagcatctctgcctaccattcccatggcctcacctgtagttttgggatctcagtacaaatatatctagcaaagcaataatttcctaactgcttttctcatcttctatgtcctttcaccaaactttcctaaaatatagatgccaaattagccttctcaaaacaacactgggcatatatcacttctcactcaagaacttaatgagttcataactgaatataattcaaactcagtatagtatattcacaattagacatattttaaacaacagattcatcacagtcctgtcttcctcttaaaagcagcccttctgctgcattttattttttattttattttagtttttgagacagagtattgctctgcagcccaggttggagtgcagtggctccatcttggctcactgcaacctctgcctcctgggttcaagcaattctcgtgcctcagcctcctgagtagctgggattacagacacgtgccaccacgcccaggtaatttttatatttttagtagagatggggtttcaccatgttggccaggctggtcttgaactcctgacctcaagtgatgcacccacctcggcctcccaaagtgctaggattacaggcatgagccactgtggctggctgttcaggtacattttctactctggtcagtatcaccaccatctgtccagtctctaatggcagagatcaggccttgctcttcctcattcttcattctcagttggcaaatatactgtgtaccgtctcctcttcagcccctctgctaggacagtggcccaagctctattgcttcttatcatctctagcctcctactggtttccagcttctgatttcaccagtactccaatctattctacatatagctgctggggtgtctgttctgaactcagctctgaccacgtgactcctgtactcaaaatctgtaaatggaatcccataatctatcccaaattcctggccacagatgacctctccaacctgtcttcacagcacctccaacttctccaccttcaatcatataccaaggcacttggagtgtatctactacatggcttcatgtaggatctagttggcctcggctctcccagagcctggaatgtccttctccatgtctgcctgggggatgtccacccatgtttcatgttctttctcaaggattttcctgatgccaccatgcagagttgctacatttacctttatatcactattacacctttacatgtatatgtacacaatacagatacataatatatatgtatattttcatatttttgtactaattacaccacattgcaattactgtgctgtatacactccatgtacagcttacttgctactgtttaggaatatctgaagcacagtagctcacttatgaatgaatgtataaatgatcattcattcatgaagaaaggagggaagaagtgaacacctctccaaaattactttcaatcatttcttaggtctacttgctgctttaaacaggtttacttgttttctcttttactattcaaataccatgcttatctccctccccactcaagacattgtgattttccccactgtaatttctactctttttaatttttctaaactacttttagaataattcttccttaatgatcagttaaagtccaaaccagtcataaaccttggttagtctcccagtacctactggtcaccactcttttgaactcctagagcacttttggcctctacaacacatttaaccatcaataatgctattccatgcttttttttttttgatgtacatatgtgtgtatatgaacagtcaatttatacatatacatctgaatgagtgtgattccctgaagagcaagagctgtatctggctctttttgcattttatcacctctctcagttccctatttataacaagcaatagataatgtttattaataaagatggccaccagacaggcattacatgtagattccataaattagtatcttatttgtaccaatgagacccaaatgacttcagaataaactgtgatttattatcaataaaatgttgaggttctaggttcaactataaacaatgttcccagcactcattcaatgattactgaacatgcttcttatggggaaccacatttgactcataactgagggaaatctgttttataaaagaaaggctttccattatgtactctttgtaacaagggtctttccataccctagatattggctcacttactggatcaaggcagctacattacaaaaaagaaaataatttggacagaatcaagaagtctattataatgtaggtatttgaaatctacctccttgctgaacttggagattgatctacagaagaaaaatcttagcatctaaaggtctgttttcaggaaaataaaaatgtctatcaatctaccataaacctgtctgggttatcaacaaccatcaatgagaagacccaggggaaaatttagggtatgttttccttagggatgacttctggtttgggtagaatatatttatttttcctactcctctatggcaagaaagtttttcagatacctttaaaaatatatcccagtcaaataacttattatttggcaaatcaaatcgatttgaagactgtttttgcattaaagaatatctatagttggattctcagtaagagagaaatgttacataataaagaaatattttataggacacttggaacgtagatatattttccaggtcatttgaatcatttaaatatggtacttttgtctagtcatatttgtcaagatccttctcagttttttgtttttttgttttttgttttttgccccagggaacgaagccatttaggaaactacattaactgcatcttctctgtgctttttgacaaaagtaaataaatagaaatgtgcagaagccatttcccctgtgcttcttctccgtgttggactgtcctctgccttccattctctcctttcataacctgttcctcctatggcctttccttccccaagctaacagcttctgtcagcagctttattcagtacagtatcaaaagctttgcagaaaaccagattaattgtgctcactgcttctctttgtttaccccttcaattcttgcagaattcaaggcaaaccaagaaaatgcatatctaattatacatgtatactccctcttagatacctttttggtgcattttgcttttaaatagatcgtataattaaaagttatctgaaaactaatacatttcaaataagattagtgtttccaaatatagcttccaaatctaacatgtattaaaatgatttaaacacatattctgtgtaccgcaagttccaaaagagaagtttatgtatgcaaatgcaaaagaaataattcaatattttccattttccacaaatactctctgtgagacagatataaacaaccatttaaaataatagtgaattttggggttaattattattactgaaataacagaagttatgtattctgtgaacctcaaagcagacctttgaatagtcttgtcactaatatgtgttaaaagaataaagaatcctcattgaagtcttattcttaaaaatatcaaaatgccatccttcaccattaatttcatgccaagatttaagagcaataaatattgtagactttaccacttctttatataatggcttcatacgataattttttattatataaaaattccctcttattcaagatgaatttgtttgctttgcttttaccaatgttaaaggtaatttttctgaatagcacggatggtttcctctgttaaaatactatagtgtgagcctcaaggcacagcaggcaatgccatcaccccagcaccactgggccatttcttctatggctgaaccttctcacatcattttaaaacatggctttctaatccttttggtcttcttgctgagaattaaaaggttagaaagtttttaaagtagtagtagaagtcttatgtctcaaattacaagttacaaattacaaaaacctcccacttatctttttcaaaccattagttaggtagaaccacatcaaggtaagtctttctggaaacatgctacgaaacaaacatgttatttaatgagaattcagaatacagcaggagaagtcacaacctggaatgaagcagagtggaaacagaattaccctgtctggcctgaaaggagtgggtttccaagtgagactccaagtgtaccaagtgtctaatgggcaatccatttacacatctcttcccatattattcaagtgcaaactgtactccataagtattttcagttttatttctttacaaaacttttgaaaagaataaaaataaatccctgggtgggattatgcacaggacagagagatgccactaagccatgccaccaagcatttgtgtttattagaagagcattcctcctatgaacatcatagtttatagagtcccaactagattataatgtagacacttctgtcagatgataatatgtctgtaaaaagtctgctagatctgtattttattcataaaggcaatggtgtgaaatatacacacaaaagacccatgtgtaaaagggctcatgtgagcgaagcagcagccggggagaaggcatatccaacacacctcaggtgcagtggcggcttaaggaggcatcccaggaacacattaatcaacacattcaaggaatgcattaatcaacactgctataacggctggcatgcccattgtttcactgtagcatgctaaagagcacagagcagcaatgtgaatgtgaatttccaccatgctacaagaaacaaaacccttttcaggactggctccatgcaccatatcctactcgactctttcaatagaaatcattctctcctgtattcgtggtagtttatgaacttgctttctgcaacagtcaaccagaaacaaagaatctttacagaccagctaagtttgacaatagctgtagaaatgccttctgcagatatgaaaacttgaatccatccaagagatttttttctttgccttacaaaatgaatgctgtcatgaaaggcaaaataaaagaaaacaaagcaaagcaaaaaaaaaaaaacccaagcatctatttgtgtatgcagtcagttgtgacagcaacatactgcattaccagcaggggcctggtcctggcctcctgctccacactgggtttcattttcctcctgggtagttccctagataaccctcctgtcaggattcgactccctccaaaagcagccagggatgaaatggccagatgctggaaggaagagacatgataaaatacccgcagaacctaggcacacatgtctacctttgtatagagtaccatgtggacctgaacacctgaggccttccagtattcctgctgtgtctcacttccaattgtccatacttggagtatctcacccattaggttatgttgcacaattaaagttcaataaatgatgattctggtgataagaatgctgaatacaaagatcctaactcaatgaataagggatgccatttataactttcatttggaataagcttcctctcagggtgagaattattttaatagaggttgtacttgctgggaacaagagccacagggcagtgcccctgccttttggtggcactgttctggtcattttggtgaacctcaaaattaaagtctatgggtcacgaatctagacttatttcatcacgagttctgattctaataatcccagaaaacagttaagaactacaagccaaaagtacagcaaggaaaagaaatcaaatccagtaagtatatgcaagaagctatttgcaaaggtcacgcattagccctttggtgtataaatgctaagtgctctacatttcatgtactggagtgactcaggcagttttttatttccagtttcaaaccagatatttctccccactaggctacaatgggaggagaggggggaacacataaaagttgcaggattccttctactgactactagcaccaattattgctgccacaaaaacataatgccactgttttcatcattgtctcactatggcattatccttacccagctatctcccaagagaaaatgctgatgtctttcttcaaacacatttcaactgctctttctgagccttcagaaacagctatcaaactgagcagcccagagtggtgggagtggtgagaagggggataaggtgagatgtccagagaaaaatggctgtgtcccataagaataatgaggacaggatgcaagaggcagaaatgagatgcctaatcaataaaggcatctcaatcacggatgtgaataaaactcagagataaatatcaggaaatgtataatttagcctccctacagaaatgttgcacattgaatttaatatgcttccatctgaccccaggacagagagcactgctcagacttcatgtggaaatggaaagctgagcagtcgcctgggttgaaagaacagaatgttcttcactgcattgtcattcagcttccaggaatgctgcatttcagtggtaagtagtcattctgtgaaaaagttcatcacgatcacaatagagggactgtccaagtatgctaatgtttcaagagatgtcacttagttgaaatctgtgccttgccttcatgctatgtcacaatgaagagggaggaagttaatttgtataagaaaagattgttctagttttccagatgactacatattgaatcaaactttactggtataaaacaataaagaggtaaatattttttacttggagttagatccctgtcttggtttttataagttctaggcatcccagagtaactgctttattcatgagcttttaatcttcagcttcatggggcaagtattctttctgtgggtgctgggtcttcttgatttgactggtatcaactaaactcagccttaaaatgatcctgtaggacaaaattttgatagctgtctttactgttaaattgtattaaaaattggccaggcatggtggctcatgcctgtaattccagtactttgtgaggccaaggcaggcagatcacttgaggccaggagctcaagaccagcctggccaacatggtgaaaccctgtctctattaaaaatgcaaaaagtagccaggcatgttggtatgcatctgtaattgtagctactcaggaggctgagggatgagaatcacttgaacccgggaggtggagtttgcagtgagcagagatcgcgccattgcactgcaacctgggtgacaagtgagactccatctcaagaaagaaataaattaaataaataaatagcattaaaattgtataactattaggattttgtaataaaatacaggttcacttttacaaatcaacttaattataagataaaagtctttttactcttaccagttttactattatctattcaggatgtaactacccttctcctaagatgtacatataactttaacaactcggtattgtaaagtccaagggaaagaacaaatttcaagtcatccacaaaaacagtcagtaaatgactccagcaccttgtcaggttattcttcatacacagcttgctgccaaatgggaacatgctttaaggtgcagcctgggcattcttcttcctcagactccttatggttactactaggaccaaacttacacgaatgtggccagcagaaaactcattttacgaagtgatttcagaggtatcctctctcctcactctggttgattatcaaaatgccaccactagcagccttgcattttagctcaaggttttcaatgcaggtagaagacagatttcccagggagagaatgtacacattagggttaatggcaaacgtgagcagtttttatgtgtgacactggataagggcagacagagggcacttcccaaacagaaggatgtgggatgggcctgagagtttgcaaaccacagtccacaattctggctgcatgcatttttctgaacatcacagcatgccagtgaatgtgggaaaaactactgaaaactctaagtagctacgaaaaaaacttatttattctaatgtcagaggccaaatacttgaatagcctagggacattctgagtataagtgtgctttagaattttgggaagtttcagtcagtctttgtgaggccagggaaacaaattgggaagactcagtatttagttttgacaagattcaaccattcacgaaaccaaaaaatgagacattttagtggctctcataggacctgacaactaaaagctctcttgagccaattaacaaaaggctagccagaaagaccaacaagaagtgtgtattgagaaaagaagaatcgagccttttcacttgttgctctagaagacagagattttcaatcgagtacccttcacacgatggaagaaagaaaaaataatgcatccagccagaaaaactcccttagaactacctgagagtgggctaggaagtgggagagcacctgctgttgagccaagcgtttccaccttaaaagggcaccatgtacttcctcacagtggccgctgttttccctgctcaccagaaaacaccatttttacaaataaactcccgccctcagtgtcttactaccttatagatatcagacaatatattatctacgaaagaattttccataccttactgctgatactagtattgtactggtaagccaccatacttaataccattactagtaactcctagtttctaacaactgtaatttggtatatgtccctgtcagaatggatggtacttactatcacattgctttaccttgcaggtgttctttatgaaacaaggacacttgtagaggagaggggtacataaaaactatataaaataggtcattttgcttcaacaaagggagctttctcttaaaagagccatttgtacaaaattaaggctattttggtgttggtcataattacctaacatcaattttgctagtctctgctaattttcacttttcagggactgttcaagcagaacaaaatttgtgctatttgatttacaaagcaacattcttagtttccagtctactaatttggggatttctgatggtattttgaaacactgtaagaactagtcatatgaagtcagtttcaatacaacacaatggaagcaaattcagctgaggcatgaatcatttcctttcaattacaaaaggacatctcaatggatcagcctaagaattctcagtaacaagagacaacatgctcaaaggattttactatctcaaaatcttgtatacaatcttctttccttaactaaaatccatgagtttatttgttaaatgaaatcaacaaggtaaagaactgaatgtctgaacaatcgtgctctcataattccttaaaaaagctattattggttgagatacagttctctgaactgtgttccagatctccaagtaagattattttttcatcaagttcagtactataatagatggcctttcagaaggcatcataggcctaacagggtccattctagagctgataatgctgaatggcataaataagaatggggcggacagcggggtaggaaataagaaatggggaaggaatttacaaagcagaaatcacatttcaaagtaacatttaaactttcaaaggagatatttttattctttggactccattgtgagacaagaaaaatcactaatggatggtataccctcaggagacttttgatatattattgaatcaaaaagaaaattattttcttgtaaatgattccctataatttttaatctttagtccctttataaacatttttactagcagtgctttgcctctgctctctattttctgggctttatgattcatgatttacttaaacaaaaatcttattactatgaaaggacatgagggctggtttacttccctatgtatttgatctatcttctttgacattggtatgattaatgtttttgcatctatgtttctactctctgtcttttatcatactctctggattgaaaagtattaaatatggcaataatattacataatcacattatttaatattataattctcatctttaactacgaattcaaatgttttgagaagacaaactcttacctttgaagaagctcttaagttgttcttccttttaattctttaaaccaaacgtcttcttagcattgctctgtgggttaaaaaatgggagaaacgttaacacgacattgattgtcatcaatcacagcagagtgtcaatatattaactccaactggctctcttatgggaaacacaattaaagagagagccctgcaaggaagacaaatcatgactagatttgccaaaacatatctctgctggcttcaatcaaaagtgacagcagagaagtgaccagaactctggtggacatcccattaaaggattccagcctagagaatcacgtctgattcctcttttcagtttagaggaataaaggtgtttttgtaatgtatctatacagtgtggataaaatactttgctatgggcttattattattattatttaaatttttttatttggtagcatagaaattttttaggttatgtttgaaaggccccaggttttcaacaagggtcataaaaagaagctgggaacaaccaagatttgaggagtgagttccacctgggctgtgacaaaggcagagcagtggacagctcccaagttctgcagtctccaactctcctctcgtcagcctcaatgtttcctttgcaaatagtccagctgagaattagccagagaaagagaggaaggatggcgagtagaacaatcacagctgagcacattaagtttcattttttaaacaaccaattcagtgacacccaaggtttctaagggaggatttgtgtctttttgaactttggatttctggaaacagaagtcgtactatcaacctctgaaaaacccttcagagaagagaaacaagtgtcaattcaggaactctggactgcactcaaatattaggacaactatgaaacacaaaattattccgttaataaaagatgcttaataatctcagctggttttgcttatgtatgtgttataaaatattccctgcattaagttgcaaaaaatgttaattacatataaaaccacccttaatagattttcattgcatgtgaagcaatgatattttatcaggacaaaatattaatattgtggaggtttgtgatttttccttagaattggaaccaattttatagtaatattgttttcactttttaaaaaaaaccctagagttgtgtaggagagcatctataagaattttaagatatatctacaataacaactcaattcagcaaacttatattgagcacttaatacatatccgccaattcactggataaatctaaacaagaaaaaaataaaatataaatacttcatgcttcctaccatgagggatctcagtccacatgctgatggattcctaagttttaatagttctcagcataatccagttcagggcaaaacgctctaaaaagcacagatatgtaattttgcataacatggttccatggcatcacgtggaaaaaactatttcatccttgcttatatatattattgatagggcactgctacatttttaaccaccttgtggtgatgtaaaccctgaagggtttgcaaagaccaccaaaagactgtattaattgtattaccatgtcagcaattatgcccaacatttctaggaaatgactttttgttacattcattactcttgttttgacaaatgtgtcaatggcctttcattaccccaaaacacatttaggtcaagagaatagggtaatacatcattgctaaggactatttttccaataaccaagtaacaatttaattttttaaccaaaatgcaatcaacttaccctattaaataaaatcagtcctaagtcaaaaggtcaagataagatttgatgtatttttaaagtagccttcagaaaagacagataacatccacgcgaaaaatgtaagaaacccaaagcccacagtacacataacaaatcaattacaataatagtaattcaatagcatataacactaaaaattcaaataattctgaaaagtgaatacttgccttagccacttatggaaaaataaaataataaacttcctgtttcagagtaaattgctatggattgggacacatttttttgctggacttttttggcagagaaagagttgtttggttttaaaatgagaattcataacattcaatgcaactgaaaatctgctattacaagcagtattaggtaaaaagtatcagcaggcaaaaacttgcaaaatctcatttggcttatactttttagttcaactctaaagatattagagatgtttactctttgattcttgtgaggctgatttctaaaaactggcctccttaacaatacagtaaaggttagattacattaagatatcaagcctttgattgcccccacccccccaacaacccagtcaattctgtctacactcttcaaaataaatacagatgagaaatagttttcagaacatcaattatgaaaactttatacgcaagaatatatttatatatctgcacaagtatgtatttgtgcaacatgcaaaactgttctgccttttatcactataaaatgacagtaaattataaatttatatttaatctttggtcttaacagaaatttgactagtagtaaaatcatactaagcccaaactctttttttttcttaatttcctgcctttgacatgatccttggactgaatttgggttccattcatacttaactggagaaaaaaggataaaaaaaccaccttgttaaaactggcatttatctttggtttctctagggtatgcctgtcatccagccgctaattcagcttgacaaggccagaagccaaaatcatcttgaaacccagttctcccattacagcagcctatgaaacaaaatacattccaaaaaacagacagtatggtctgagataaagcatgttctccaactacagctccatcagatggcacccagagggccctccctctaccacaacctagctggctggggtcctgggaacacaggcccctaacttctggccccaagtttagcaccaagttcagcctactcctgcaagactaaacttgttgggacttgggactgaccccatgttatacatcttgtggaagttagggtgggagcaagaagggatccattcgagcaagaaacttgcaggtgaaccaatgtggatcatgctttacctttcagagaaattaacacattggtccttgaagactgaagactgatcactcacagaagcatctgactgcctcaagtgacactatcatttgctaccttgtagactgatgcaaacatccaatagtgagcaaattacattgatagaggacatgttggatatataccaccttactgtcagcatgctggaaatcatgttgtcatatacataaatgtagccttccatggtacacagttgctatggtttgaatgtgcttcacaaagttcatatgtgggaaacttaatcacaaatacaacaatgttcagaggtgggatctttaagaggtgattaggtcatgaggggctttgccctcatgcatggattcacgtcaatattgtgggagtaggtttgttctcacaagagtggatttgtcataaaagtgacttctgttcccctcttcctcttgctttcatgtacactctatcttgccctctctcatccttctgttttctgctacgggatgatgcagcaagaaggccctcaccagatgcaggcctcttgaacttggacttctctgcctccagaaccatgagccaaatacatttattttccttataaattacctagtctatagtactctgttgcacaaaacagactgagacattcgtgcttggtatacttcatggtttcataaaagtacaaatagaaacctaaaagttcaggccgggcacggtggctcacgcctgtaatcccagcactttgggaggccgaagcaggcagatcacgaagtcaggagatcaagaccatcctgtctaacacggtgaaaccctgtctctactaaagaaaaaaaaaatacaaaaaaattagctgggtgtagtggcaggcatctgtagtcccagctactcaggaggttgaggcagaacaatcaatggtgtgaacccaggaggcagagcttgcagtgagccaagatcacaccactgcactccagcctgggcaatggagcaagactccatctcaaaaaaaaaaaaaaagaaacctagaagttcagtgtgcagtcatggctagctgtctaacaaagagtcatgccctctctctgtcatgtaagacagacatggctgtggagaagaagttcctgtccagggtctgtatttccagttctccttgtgtctaggtgtgactgcaaggtgtaagagagctaatatgtgtcacttctttgttcagatgtttaaaaagaaaatgtgtcttttccacgcctcctatctctccatttctggctgtatgtcaatgccagtgtaacctgaaaagttgcacagcatggcctttgtcagcttgggtgaagagtagagatccttccctccaaattcatggtctgcatcactaacagtgaactgttacatgagctgagagggaactctaattgtgtgatgtttctagtttgggggtttgttagaatagctagctctgccctatctaatagagttggcacactgtgaacataatagaaactttaaatgaaatattgttctcactggtcctttttctatgtctataatctaggaagaagatttaattttaaaatataagtgtattcagagcagtagagcaaaattgattagagggtattaaataactccttagtagaaacagctaaagtaatagtgtttacttcacctagggaagaaaaagcttaaaggagtctagttaaactgtcaatgaatatatgaaggttccaaaaattttatatggcagatagtgagaaactatttttcaagttcactgaacataaaacaaatacagaaggctctgtgtgatggctataaactaataccgtatctaagaaaatggggaagactgaggctgggtatggtggctcacgcctgtaatcctagcactttgggaggttgaggcaggtgcatcacttgaggtcaggagttcaagaccagcctggccaacatggtgaaagcccgtctctactacaaaacaaaaattagttggacgtggtggcgggcacctgtaatcccagctcctagggaggctgaggcaggagaatcacttgaacccaggaggcagaggttgcagtgagttgagatggcgccattgcactctagcctgggtgacagagggagactcagtcccagaaaaaaaaaaaaagaaagaaagaaaggaaaggaaaggaaaaggaaaaggaaagggggaagattgaaaatagagtttttgtgagaatctgattctgcagatttaggagggacctggaaattcacttttccttttttttttttttttttttttttgagacggagtctcactctgtcgcccagactggagtggagtggtgggatcttggctcaccgcaagctctgcctcccgggttcatgccattctcctgcctcagcctcccgagtagctgggactataggcaccggccaccatgcccggctaattttttgcatttttagtagagatggggtttcactgtgttagccaggatggtctcgatctcctgaccttgtgatgtgcccacttcagcctcccaaagtgttgggattacaggtgtgagcccccgcacctggccagaaattcacttttctaataggcagacccagggggttctggtgcatgtggtcccaggctacacaataatcaacatggtgaaataatgtctctaggataatgatggttaaacaatgaaatacacaacattgtgaggctgttagattccctttctcaaagtaatatcaggaacgttccacagggtggaaaacacactgttgacaaacacagaagagcacttggaatctaggtaagtaacaaaggattccaatccttgagcagctcagagtctcaggaaagtgaccatgagtctgtgtgtgtatgagtgcacatgtgtgtgtggagaaggtggtgataagaaggagaaaacaaagatgacccctggttctgaatagagaaaaggaggtttcattcacgggtgagcagacgtacttcagcgtggccctgggaatcccggtctcccctagccatcctagccctggaacagcctccagatgaggttgccacccaccaagttatagaatgaaacaaatgaagtcgaggcatccaaccctattcaggaagcaaaagcagttcatgtttatatattttacaaatcagacttctatgtcaagtgggaagaaagattctaaggcaaataaaaaatgttctataaatctacaactacatgaagagtcattgtttaatgggtattgaggttcaatctgggatgatgaaaacattttctaagatggatatgataatggtcacacaacaatataaatgtacttaatgctactgacctgtacacttaaaaactgtcaaaatctcaaattttgtgctatatatattttaccacaataaaaaaggaaaacatggctataaacttccttccaactctgtaagttaatagacatgatatttgtaggaaaaaaattcaacttataccctaaattcctccattaatactttctgtgtccttgaaaagttaggaaaacattaatttattcaacaaatatttagtgaccaactactatggctcaggcactgttctgggcactgaggatgcagtaataaacagaatagaaaaaatccctgccctcatagagcatttacttatcacctcgttatgcaaaacatttattaaccgcctatgatttgccaagttctatgctgagcatcagaaatacaatggttataaagaagtgaaccttagaaaaccagtctcttcttggcctcatgaagcttatggtcaatggcagaagatagatattgaacaaataatcacagaaatggatctaaaaataccaattttgaaaagttgttaaggcaggggtgtgtggtgctcctagagtgtgtggtgatgggaaccggctttgtcaaggtcagacttttctaaggaaatgatgactgagctgaggtcctacagagctggggaaggaaagatgtgttacagttttgataccaatgcacaatttaattgggcacaaaatgagaagaagaaaagcaggggataagagggacaggtctgatgaggctgacaaagcagacagaggcctggccacttggagccctgtagttctttcagccttttatcctaagggcaatgggaagccactgatgtattttaagaaagctgagggtggaagaggaatgatttgatcacaaataatacttattttgctgctctgacaatttaaaaactaccaactgaaaatgaaggcaagaactacaagtgaattcctatacagttataaaaaaacacttttgatagtgtttaatataccaaagatttatcataagataaaaaattattaacagcactccaatttttaattatttggtattgatcaaacatagtctcttgggccaggaacagtaactcatgcctataatctgagcactgtgggaggctaaggcaaggaggatagcttgggtccaggagttcaagaccagcctgggcaacacagggagaccctgtctctgtgaaaaataaaaataaaaataaattatctgggcatggtggcatgcacctgtggtcccagctacttgggaagctgaggcgaggattgcttgagtctggcaggtcgaggcagcagtgagccactgtactccagcctggagaacagagctagacaaaacaaaacaaaacaaaacaaaacggtctcttaaggtactattatataatctactaatgaagccgagatcacaccactacactccagcctgggtgagaaagcaagactgtcaaaaaaaaaaagagtgactattttaaaacacaaaacaacagtgaaactatttgattaaataaattatattaaacttcataaaatatgattatttaggcatgtttcattgacacataaagtgacaaaggaaacttaactaattgttgtacaaatttgattagtatctaagaacttgaacaaagaatcaaacacacatgcaacatttcttcccttaaaatatgattatcaatgtaatatatactgttgaatgggacaaaaaattcagaccagcataatactgtgtgctaacagaaaatatatatggtaataagaaaaactctatgctttgtatacaatcaggttcactatgttaatttacgcaggcgtaaatgctcaataagtagatgacagacatttctgtgcatttcatattctggataaaaacaaggataggaaacatcaaacttttaattgcatagtgagctattctgtcccctgaacaacacagtacaactctagactatcattcaagttcagaaaagttgtataggtttggctcatataacttgcataattcatcttttaaccacactgtcatttatacaattaagatctgtcaattcatttttctgcttacactacattaagaattcaatgtatttagccagggaacgttcccaaggatgctttagccatgttttattataacctactgtgttataacctactagttcatttccgttgctttaaagtaatacctgagattgcttataaagaaaagaggtttatttttggctcatggtctgtaggctgtacaggaagcttacaatcatggcacaagaaggggaaccagtgtgtcacctggcaagagagtgagtgagagtagggtaggtctcagactcttttaaacaatcagatctcacagtaattcattatcacaaagagggcaccaagccatttatgagagatccacccccatgagtgaaacatctcccactgggccccacctccaacattggggatcacatttcaaaataagatttagagggggcaaaacatacaaaccataccacctaccaaaggccccttgtttttataggtcctgggaagtaagacctacttgcaaagaggcctctacgaccatcactttttgagactgaggctcacaaagatcttaaagtttaatctgatttgatttaagacctagtaattttattgctctatccatttacactttggtctgaccaattttaacataattgcatacaaaatctttcaaaagtttcatgtgtaaaattcttctttcaaacaaacttttatatgcccaattaacttggccgttggtatcaaaactgtagctcatattctagcaggtgttaaaaataataaaccagatgtaaagacaggcataaaaatatagtaaagcagattcaggaacagtgaaggagaatgaatgcatttccttaaaaggaaggcgaggaagacttttttaaaaaattagaattataacttggctgtgcatctttttttgttgctgttggcagtaaataaatctcattataaagatgaaatgaggagaagttttgaaaaactttcaaacagttggataaagactagacatttcgttttttttcaaagctggcaagtcatttttggttcaacattctttttagatgttctagttttctagtcttcccttgatacagacatgaacttacaagtagtcccctcactttatatttcctcacaacttcctgaatatttgacaggctcattgaactgaatttgaagtcttttcatagtactgttctggaaagtaaaaggaatgaaccacaacagaaacaaaataaagtggtttccaaatatgactctgatgtagcttctgtgatgtttatcccacgttccctattggttgggacttgggacctcctaatgaggactttgtctctagttcttagttgtctgcaaacactgattttgttttagttacactgattttttgaaccaaatggaactttttgagcataaaaaggcaagggaattctaaaaggatttaaattatggcttgggaggactcccaatcacacctaaacctgcattatagatatctcggtagtgtcagcggaggagagtggcctaatgttgatcaatatcaaaatggctttgggagtctctgaccactcagttctctaaatcagtctcccattttaaggttatgaaacactgatcttaaaagaaatctggaatattatcagttgcaggttgctaactatagttaagttcaaatataaagctgcccatttaaagaggtcatctttaatgtaacatagcctgtcttaaacaaaccattattacaaataaagcaatcaaattatgaattaaatagcttaccaagtgacattaagcaaattacttcctctctgtgtacaaaatggggttaataatcctgacctatttctcaaggtctctggggacaattcatttaggaattgcctaagtgctgtataaatgttaccggtgttatgagagcttggttttattgtcattggaaggcctatcataataaggaattcaggggttttagtcagaggtgaattaacaaagcgaggtctatgctaatacaagcgccctctgaccttggatcactgagcttgaaaaattgcacagatcagaatgtgaatgaagtttgcattttcagagacactgtttttgttaatgtatttcctattcaattcctttgctttgaaaatcgttactttggaagcaaagcaaccaatttctatttccaccattccatttccacattttttcattattctccattgcaattcccagcatcatttgcatttaagcatgacattgaaggcatccaaggcctatccttcagaatcagctatccagtacacccaggaaacatgcctataagtggatgtgggctgtgtattcaccaaatctctttcattttaagaattttatccttattgtgcaatccccagacttttattactcttagagaaagcaaattctttttcccacttaaatttgcacaagttattaacttatttggcaaatagtttctgagtacttagtatgtaccagacactgtcccaggtgctggagacagcagtaaataatacaggcagaaatctctgcactcaatagcttatattctagtgggtgaagataaatagtaattaaaataagtaaacaaatattgtgttttaggttgcaaaaaataaagtatggtgagaaaatagagtgtgaagataaagaggggctgcaattttaagtacaatggtcagggaaaaaccttcttggaaggtgtaattccaaagagatttgagggctgtgaatgtgagagccactgcgaaagggctttgcaggcaaggtgaaagttccgggcaaatccaaaggccctgaggttggaatctctttgcctgtcttagaacagcaaggcggccaggtggctgagaggagcagcaagcaggagaacagtgggagatgaagtaagggatggaaaggggcaccacatgatctagggcaagacctctggcttccactgagtgaaatgggaagccctggaggagtcctgagcaggggagtgacatgacctgacttccattttgaagggtggaataggctgtattgagaataggctgaaggggagtgagattgagacaggaagaccacataaaaggctcttacaatagtccagagcagaggttagtggcatgatcctgggggtgccacatgggtagagtttcacagctttcaattattaaacacacccttcttctctaactgtggtttcttatttgagttacttcattccctaacaaacttttttcctttaaagcctttccttcccgattcctccctgtcaataataatgcttgtcttcacatcagataagcatttgaaccctgtttaaaagggttcaaacaggccaaatttgggtgtagtcaaatcagcaagtaaactatgctccaaaaccacaaatgacttgacaggattctattgaagttctctgtaaagacacctgcttttcttcaacaggctctgcatcacagaatggatgaaggccacatggaagcctccctgtccagtcgggggctgggtggtaaggaggagcaggattaggtttagaagaatgggatgaggccaacagcttccactttcaataacgtctacaaatctgtatttcaagttaattaagtcccaatagcagtgcacaaaaccatttttgaaacaaattgtcaacctgctttcatatgctgttatgtccatattaaccaaagaaatgctcactgacttttaactcctgtttgtgtaatatttggcactgtacttttttttttttttttttttttttttttagctttagctatggctggtgtaatcagacaccacgtaccaggcaaacctaacccttgaggccctgattacttaaaaacaataggagtgaaacctccctccaccaaatagaaaggaggtggctgcattcaagcattattcctcgttctctagaaaggtagcggcaagggctactactcaaagggaagattctggaaatggttcttgtgggaaaagaaggaaaatacattagtcttttcagctaacctagaaaaaaaattcttggcaacttcagaaccaatggagaagagaaaatgtgtaagcagaaagttcttggattaccatggcatcttctctaggtaggtgacctgggtcacctactcatgacttgggtcatcttatttgcagaataattaagaatgagaactttcattctatctatgaagtggtacatgactctaattaagggattattactttaaatgaattacctctctttccttcatcttgggcaactcattaggaaaaaacctaccttttgacatttagaaaagatttttttttttcctggatcttggagttccaatctgttgcttcagttgttcccagtatctacgttgctttccccctcatcttcagggcttttcttgtatgtcatctctatggagacttctttggctgccttgtccaaaaaggtaacctacattagatgccccacctccattctctgctttattttttgccttaacgcttatcatgatctaacttactacatgtcttattgattcatctttttttttaatctcatgtgccagaatgtaggatttatgagagcaggaatttttgtctgttttgttcatgctatatccccagtgcctagaacaatgcctaaaacagagcatcagtaaatattagttgaattagtgaattaactccacagagtgatcagataagtgttagcttgaaattctttatttgaaaaatcaattttggccactagatgcatagaacgtatctctggtaagatacacaaaagatgaataagagcatttaccttggggaaaggaatctgagggggagatatttacatataattttatagctttatgtactagtcaatctttaaatctttagaatattttatcctcactcagaatgatgtatctgagtgctgagtatctcattattttaaattctttttgtaatcttcaacagaaaaactaataaatgttaatttaaaaataagcacacgtatgtgtaaaaatctacgcatacacatgttttgtgttcaataagacaaagttaatataaaaagatacatctaattctatgttttgattcaaaaaatcatatgtaacagattaacagaactggtttgtgtagtatattggtaccaaagacaactgatgtgaataagaacttcccacttatgaagacattttgaatactgaggaaagaaccaagtaaaagagtattcttacaatcttatttatatcaatggcatggcagtaagtatttcaactggggcccgggcttgaaaagcattccaattttcacttgaatttcagggtaaggctaagtattacacagtatagtatctctagcaagatttcctgagaaaaatggaaagaaaccatgaaaatcaaactataatcaggaaagtcaagagaactgggctaacaaagtagtagaattaaactaaaaagcatagtcacttgaagagcaagaaaattcagaatgaaaagaaggaagacgtggcaagtgaatataactcaacagcagaaacatattattctcaatattgtgtaagtaaacatgagacctagggaaggtttacagatttgatcctttattttctggccatgaactgtagatattaagtttggggaaagtgccctagattcctatttataattcacagtggcctgtggtgatgatgcatagcaaatttctcaaagagaccagggacaagagaaagcagccctgagggataaaaacctttttcaaggagagaaaagaggcaatcatgaaacccatgtatcatgctgcccttatccttgacttctttaaacaacacttggttattttggtatctttctcccttctccctcactctcttgattatttccactttccaaccaaacagtctttgattttatttttaatctacctaacaccagctgttgccagagccttcctattaagaggcttagtccaaacagtctgatctttaaagcaaatatccagcacatggagccaacacagcattttggaaaggatactggtccgaatgcctgggtgggaattcagctctgcctattcctagctgggtagcttgaggcatgctgctcagtctagtctctctaaatctcacttatctttaaaatgtggctaataagacgtgctctctttgcagaggatggttaagaggatcaaactgaatagtgcaaactataaagcactatatacaaacataagttatttttctggtgactttcatcagattttgttactgttcatcaaaaatctgaacagaaatagaaaaactgccctaggaaaatggcagagtgtatttaatgcacttgcttcatgtccagctgtaataaaagtcagataatgagtattttcaggggtgtttctaaagatgcaaaactttggtttcaagatactagcttgaaaccaaattgcattaggtataatcacaccatgtttcatttcatgaggttcaaagaactgagaagcatggagtataatcttacagatggtctttgaagatgtttcaagagctaaagctaacacatccaattatgatattttttaaaaaatgtgtccttcatccagcttctctcatcctcttgaccactgaactctctggaatacaggagaatcaatacaaaaaacctaagggaaactctcaagttagtgccgagggaatgacagtagattctgcttttaatcaaaaagatacatgagtaaagtttatgctacactttgcacacaaaaagtattatactatcctcaaaaacatcaggcatgcagaaaataagggagaataaggcctaactagaaaattgtcttaaggtaatatgaaaatggtctgtgagactattaaaaacaaatatccacagaaagaatgacaaaagcattaaaattacatcttaacacaccctgtggatgtaccctgatgacaaacaaacataccagcacttaatttttctttacaatatgttcacattttgctactaaaaatattcaaaccatatctgtcagttgccccacgaaagttcctcttttaagtgttaaacaagctatgtgaaacaaactccactaaccaatagcacacaaaataaaaccaaatcaatgaacagagaatatcaagcttcagacaagctgttatagatggaatacaattctaatctgggcttcggttttaaacaaatcattaaaacgatacctgagaggaggaacaaaaaccagccagtctctggactgtcaaacattactttccataaagtacataaacaagcacagatattaccttacaaatgaagttatcttactgctttccatttcctcccagtagcaaagggaaattttaaacaaagtgcccatcccagcacatttctgcagataaaagcactggcaattgaaccctgctgtggctggcccatgtgcagtaaaatgttaaagtcctgctcctgacagccaatccaaagctgctcagacctcccaggcctcccagggtgatcagcctggctttgtggcaatacaatgggagttaaacatttcttcgtatccatttagaagcaagaaaaatctgtttggttgctcaaaatgatttagcaaaacacacaataggttatgatttggtaatcttgtttcaagaaagtaactgccatattttcacctatgagggggagattgtaaagctgttacatagtttcttctttctttttaaatcttgtactaactcaaaataacattttagaatggccatctgggtttttattccttttgacaagacacaataactgctgagactggcttctttatttcagcctcagaacctacatcacatagatggtagaacttgctgtccaatgactcacaacagtcatttctgatttttctttcatggaagcctagaaactctatttgattcagttaatttaagatctcagtaaaaataaatattataactatttttcttactttctttccccctacctatttatttctgaatttcattcctctcttgggcttctctagtacccacagtcatgagtattcacccatccaagctgtaagaattttaacatgttgcttattattcttcttctaagccagatgctattggtacctaagtacacaaataaataatgaatagtgagctggtattttcattagagtgcataatacattaggattatatttcatgataagacctttaaaaagtaatagaaggtatttctaaaatgtattatgtccagtaggacctcattgttgaggccgccacaaatccttaaccatttattttgcttaaacttctaatgattgcttttcaagctttcaggttctctggaaaaacttcaagagaagcaggtttataactcattcaccagctatgattcaagttttgaaagtgtccatttactgtattttcaattacggttattcacttccaaacctgaaaaactgttctgcatttattacagtgactgttacatgaacaatgggtgaatatatttctttgaagctcttttcagcaattcttaaagacctgcttagaataatgcccttcttcacaaaagcacaatcaacatgtaacctaatctccttcaaagcgtattgtcagagagatcaacaatgactgtaatcacatgacctctgaaacccaaccaagtagagacatcagagaatcttgactggctcctatctctgcacatccatttctctgcttaatatgtcccaatgagccttgacttatgctaataaaaacttgaaaaatggaaatcattttctgattttcattctttcaaaagataaaagaaatagggaggaaagcctttaaacttatttcctcttgattacatatctactgctatgtatatgtgttactagtggtaccagctgatagaaaacagaaaataatcagctgcctagtcattgatacaacacacatgactgattacagaaaccaggttagacactatgatttatagtgttactccttttggtattttccaatcatttctttcaagtgcatttataaaatttaaatatgcatttccattggaaagaagaatttgtccatgttttcctattaatatgttaacataaccttttcttttcctagttagctattcccacaggtataaaaaaggctcacacaccaacttgaaaaaaggttgcattttcaagaacagtggaaggactacttaaaatggtgctttaaactgtgattgtgctctgagcagtaagggctcaatggaggagagacgagtcttgattaagcagcttgcctgaccgagcctaatcagaattatttcagcacactgcttcactacagctccagacccattaaacacgaaatgtttctgcaggcccgtttctcactctggctcccactgtgcccgttactttgcggcagtagttactcactgggctactcaaaataatttttggtaaatagaggtactgggtttaacaggctcctcacaatctatcaatgaatctgtcattttacgacaagaatgggtaccgtcccaccaaaacaggaccactgggatggccatgcagaagggggccctttgaactaattctttgtcttgacctgacagcaatcactcctttcacaaaagcagctctgtcttccaaaatgtaatttggggtatctcattttaagctcatcaggttattatattttatcatctggtttaacacactctgaaagaggcagttccattttgggggccagaggaggcgattcgtggcaccaaaatgtacacgcagctttctgtttccctcaatctctcagattgtccagacctatccattacaggaatgtgactaattttcttagttatgcttagtatccattttaaccattatatccttataatgcttagtatccattttaagcacacaaaaatattagatgtacttttttacagaaatattttttcatttaaacctaaaaatatatatatcaaaattctgatcaaagtagatgcaggctgggcgtaatggctcgtgcctataatcccaatactttgggaggccgaggcagaaagattgcttgagcccaggggtccaagaccagcctgggcaacatagtgagacctcgtctctatataaaaaagaaaattagctgggtgtagtggtgcacacctgtaatagtcccagttactcaggaggctgaggtaggaggatcccttgagcccagaaggtcaaggctgcagtgaactgtgactgcaccactgtactccatcctgggcaacagagtgagaccctgtctctaaacttaaaaaaaaaaatagatataatcagaaattttcggcttttaataaagtacttactatgcaaatgttatagttctaaacaccataatgcatgtgtggtatatttgcccttgtgcctcagtttccttatatgtaaaatcaggataatatagtaccttctttggaaggctattatgaggattaaatgaattaatattcataaattacttacctcagtgcctggcacatagcagatgctatgtaagtatttcttttaaataaatagaaataaaacagacaccatctatgaatgaaaagatgtgtagatgattctttcaggacttcatccagaatgcaagagttctacttggagctactcgtttaccttcatgatctttatttttgacattatttagcaggcctttataatggcccaagttcacattcattgccagtttttttctgcaatgtctttataagttctcctagcacagaaatgatggatgcttttcttttgaaattcttctacaggaagtaaaaagagtgtcaattacctggctgaacatgaggtaaagtttttgttaaagtagcccataaactaagtgggaaaaatgaattaaccaagtgtttctttcctctctcctgaaatgctatgctatgccaagaagctcaccaggcatcaaagagtgtgtttctcaacactgcagatctgcatagtggagacaagttaagtgtcacgtcatttgaggaaagtgccacaggagtcatctgtttctgtaaatactgtacagagacccaggaaccccacagataatttgatggcacagcagactgacatcctattgctttttcataatttactgataggcaaaatgccaaaattctagaaaggcatcatgatgctgagttaaggagaatgactgaaaaaatgttcttgatgcaaattggtatatttttcaatatttcaagagaatagtagagactgggttactttctgtatctgggcactatcaaaacaccaagaatgaaatttgcttttttgtgaagacagtcatctcacattcattaattctcggctcactgcttctcttcccttcaatcaccatctccttaccactcatgtccctccttgtatagagtacatatgggttttccaaaccactgcttttacaaaagaactgtggtattgtgacaactaagaacgattccttaaaaaaagaatccctgtgaatgaaagtagtcaaacactggatgcctttaacaagaatactaaaactaatcagaatgtatcatacactatatatttacaacactttatatagcgcctctttatggctactaatgtacatatcaagacaatgtagacatggggtgtgtcaatacaacacacatcttattcaaaacacatgtctaactgcatcgcttttaaagtcagtgagaattatctttgtatacatgaaaatgtatcagacaattcaaagaacagaatagacaatgtaataataaccgaaatttggaaggatgtaacaagagatagaaataagaagagaaaaaaaggaggttgtaaaacataaaaggatcaaatctatgcaattgctgttttgtagatcaaaaaaggtcaaataccagcaattttatatgattcaacctaactacttccttgggactgcccagctcaagtaatgtccaaatcacttaacagaaatacgatcagtgttcccagagcaaataatttccatttatatcactagttgtaaaacaaggcttattaccattttctggaagtttccattgctatagcaataatctcccaaacaaccacacattactgaagtgtgttcaagtactgaggtaatttttcctacctctttctcatcatatatttaaacacatacacgcacacacacgtgcaccctttctggaatcattctctctagaatatctctatataagaatatactacatagaagtttattttttaaataacttcactgctgacatctagcaccatatttgaataatggagaaggaattcatttgtaaaactaaaatagaaaaaggcttgataattctattttaacaaaactcaccaaaatcaccctagctggaagagatctttttaatcagatattttcaaatattttctaaactgtaaaatctatcacctgttcttagaaaaaaatttaacaaattgtcttttataacagttgttacaatgatgttttggggacatgttaaaaaccaggcactccgatatattttttaatagtctgagcattaggttagaatctgttaaaagatatagaaccctaacccaagaaattcagaaacccctaaacacctattgttcatacaatagaaagttcaacaacccaagttaagagttcctaaaagatcaatgcaactcttttaactgactttactccttctgctacagttcatcctactagtcactcatctttcttttcttagacaacactatgggaaataataacattcttcacaaaacccccatctctattgtatcaggctttccttacagttcttgtttgaatgtgtgtgtctctgtgtgtgtgtccgtaatttcaacaaagttgcaatcttaaatttttaatttttgaagtcaacattatgtcacaaatatttttcatattgctaacaatattcagaattgtaatttcaagtgaacacacaatattccactgaaatgctgtgccataatttttgtcacaacatcaagaatttttgaacattttccttaaaaaatagaagtagaaacatgtttatggatgtgccattacacattattttttaaatggttgcattgttatttctagcacaaccagaagtgtatgtgatcacctttacatgctgcagaactggaaattaccttaaatatttcaaacagttcaatagatgtaagacatgataatcttcccaaacaccaattagcatctattacccacaggttagatttccattgcctatagaataaaatctttggtctcttattcaaaatcctttacaatccatcccctacctacgactccgaattgatcttccatgggtcttagactgttccagctaaacaggtctacggtacctacccctaacacaccaggcccattccacctgttttctctgtttgcagacactgttctttgaatgtgttcctcactcctctccctctgttcaaatccctctctttcttcaacaacaagatccaagtccatttgccccatgacaatttagctgaggaacatggccatcagatcacagtcccacctgagatgagaaagccaacatgggggcatggcccactggacagcgtgtgcctgtgagtaaccagacacaccaaggagggaacaggctaccaaacatcaccctcccacttgatttcttcagatgatttacaaatagaaataaaatagtatctagtagtcaagcagtaataaaatggtatgccctgatatatctaatattttagataagatgagaaatgagaactaaagagacaaattaggaaacaggaaatgttgaccattttgctctttatattatattaagacagggttatgtaataaaaggtagcatttgttgaacccttctatcactgttttaggcatatttacatccattaattaacaatctttataataacactgatatatttccaactactattgccattttacagaagaggacactgaaggtcagagaagtaacttgcctcaagccacagagcaagaaaattatggagctggaatttgttagtatatgtagtgttagtgcactctctttcaaaccacagatattgtcacataagaatttgtattaaatctcatgttgaccatgccacacaaatcataatcataggcttattaaagcaataaatgcttctgccactgatgtattttcctttacagaacacataagagattccctatatttttcctcataaaataaaaaataaagagaagataagagagtggaaacttcccttccaattcctcacctggctggttcatgtcctgtggatctgttccacctgctttttttttttttttttttttttttcagttttcactgcaaagacaagtggctggctggctggctgccaactaagggagagtaatttgaagaatgcttgggagatctcagattcaactattttgatctctcttctattccttagatgcagaaaatgcctacctgctaatctcacacagaagtccccaaagacatatgtccttagagctaattccagggtactgaagtgaaaaaatgctttttattggatttcagatgtatttttcctccagctgaaccacagaaatcttactgttgctataaactgaacagtgtcctctcgtatctcaaattacattcctgggagagattctagctcacacataggacagatccatcactctattaactatctactgtttccctctgttgcttaattcttttttcccctctatttctattttccacagtcagtagaaagcactaccattgatggggattactataaagaacaaaagaatattttcaattacctatctttaaatcaagacactacttctgaaaatgcctctctcctatttgatttgaaatgaccttacacataaatggacgtccagagccccattttattctggtctatataaattgttagttgtccatgacccctgcttcattcaagtgacctttcttctaattcaggattttgctgaccttattttctataattactcatatttaagaggttgtctaataccatccaactcatttacataactgaggcaggcaaatccaggacaggaccttaagcttcttctacaagtccagtgccccttcccggctgtctaatccaatttgatgctttttctgatagagcttctgttattcggtatgtttgcatccatttgtatgcacccagaagaatggacgcagtgtttacaaaaataaaatgataaaaagcacagaaattttttaaaagaatgaaaaccagagcgattagctgatttaacattatctgtaggaattaacaactaaaacgacttgcctttcaaacaacattatgaatttttttaaatcatgggtattgattacgaatatgttaaaagttaaaaggttctcctgattttctttcactaccctcagtattgtgccagcgaagaatatagttttccagattcttctagggttcactagaaactttaaaatgttctaaaagattttatctgaggaaacccaacctaattctatagagatctactaaacctaagctctctcttcatcctcacacatttcaaaaattttccacacacattgtaaaattcatgtaaacaactgaatgtaaaaattatttttaggtaaaatataactttcatatctcttaagtaataacaataaataattacaagtaaataactacagttaaatagattcctttttgaattaaaagataattttaattaagataactagataagatagaaaattcttaagagttcttccaataagttattgataagagcaagtaatagtaaaaataaatgtattttgcattatagtgaaaaactggttaacacagcctggcatggtggtttatgcctgtaatcccagcactttaggaggctgaggaggatgaatcgcttgaggccaggaattcaagaccagctggccaacatggtgaaaccccatctctactaaaaacagaaaaattagctgggctggggacccacacctgtaatcccagctactcaggtaggtaaggtgggagaatcgcttgaacctgggaggcggaggttgcagtgagctgagactgtgccactgcactccagcctgggtgacaaaatgagacttcatctcagaaaaaaaaaaaaaaaaccacggctaccctctttgggtcccctccctttgtataggagctctgttttcactctattaaatcttgcaactgcacactcttctggtccatgtttgttacggctcgagctgagcttttgctcgccatccaccactgctgtttgccaccgttgcagacccactgctgacttccatccctctggatctggcagggtgtctgctgtgctcctgatccagcgaggggcccattgccactcccaatcgggctaaaggcttgccattgttcctgcatggctaagtgcccaggttcatcctaattgagctgaacactagtcactgggttccacagttctcttccatgacccacggcttttaatagagctataacactcatcgcaaggcccaagattccattccttggaatctgtgaggccaagaaccctaggtcagagaacacgaggcttgccaccatcttggaagcagcctgccaccatctgggaagcggcctgccaccatcttggaagccgcccgccaccatcttgggagctctgggagcaaggacctccccgcaacccagtaacatttagcgaccacgaagggacctccaaagcggtaatattggaccactttcacttgctattctgtcctatccttccttagaattggaggaaaataccggacacctgtcggccggttaaaaacgattagcgtggcctccggacttaagactcaggtgtgaggctatctggggaagggctttctaacaacccccaacccttctgggttgggaatgttggtctgcctggagccagcttccactttcaattttcctggggaagccaagggccgactagaggcagaaagctgttgtcccaaattcccggcagtagccggttgagatcatggcgcagccagaagtctctactcaacagtcacccatgcatgcgcccctatctttccttctgacccatacctcctgggtcctaaccatgactttcttaaaagggtagccccaaaattctccttacctctgaatctacttcctctgatccctgcctcctaggtgctaatggttcagactttcatttcctctagcaagttgtatctccaaagggatataaggaagctctacactgtatccttaggcatctaggctctaaacccagggagtcttgtccctgatgtccctaccgatttaggtatacagttctcgacatgggcagttatgtgggacccattccccaccacccttgccagggccccaagtttgtaaatggctaagagaggaaagtgagagagagagagacagagtgagacacagagagagggagagacagagagagagacagagaggagagagacacagagaggggagagacacagagaggagaaagaggcagagagacaaagagggagtcaaagagagaaagaaagaaaaagaaatagtagaaaaaaaagtgtgccctattcctttaaaagccagggtaaatttaaaaaacctatacttgataattgaaggtcttctccatgaccctgtaacactctaatactaccttgttctcagtgtaaacaagggtgtagcctgaaaacactgagaccgctgacaacccatagctttcctataaaaaatccttaacccagtaacccgcagatggcccaaatgcattcaatctgtagtggcaactgctttgctaacagaataaagtagaaaagtaacttttagaggaaacctcattgtgagcacacctcaccagttcagaattattctaagtcaaaaaagcaaaaaggtagcttactaactcaaaaatcttaaagtatggggttattttgttagaaaaaggtaatttaacactaatcactgataattcccttaacccagaagatttcctaacaggagatttaaatcttaattaccatacaaaggtctgaccagacctaggaggaactcccttcagtacaggatgatagatggttcctcccaggtgaatgagaaaaaaatcacaatgggtattcagtaattgatagggagactcttgtggaagcagagttagaaaaactgcctaataattggtctccccaaacctgcgagctgtttgcactcagccaagccttaaagtacttctagaatcaaaaagattatctcaatcctgactcaaaaggttacctacaccctctgtgaaacgaatttacttaagaactgtttatgggactgcatcttgatggggcagctgggttgtcatgaaatactcaggaatgcagcctagctctaggactcacccctgagcacaaaggcaatgttgggcatgctggtaaaggaccactagaatccagcagtccgaacccctttctttgggttaagaaaggcgggaaaacaggcgcaggactgctacattggtaagcgtaactaatccaataagcagaggtccatgggtggtgacacactctggaaaggaataagcattaggaccatagaggacgctctacgactaatgctcgtcggaaaatgactagaggtgctggcatccctatgttcttttttcagatgggaaatgttccccctcaaggcaaaaacacccctaagatgtattctggacaattgggaccaatttgaccctcagactctaagaaagaaacgacttatattcttctgcattacctcctggccacaatatcctcttcaagggggagaaacctggcctcctgagggaagtataaattataacactatcttacagctagacctcttttgtagaaaagaaggcaaatggagtgaagtgccatatgtacaaactttcttttcattaagagacaactcgcaattatgtaaaaagtgtgatttatgccctacaggaagctctcagagtctacctccctaccccggcatccccctgactccttctccaactaataagcaacccccttcaacccaaatggtccaaaaggagatagacaaaggggtaaataatgaaccaaagagtgccaatattccccgtttatgccccctccaagcagtgggaggaggagaattcggcccagccagagtgcatgtacctttttctctctcagacttgaagcaaattaaaatagacctaggtcaattctcagataaccctgatggctatattgatgtttacaagggttaggacaatctgatctgacatggagagatgtaatgttactgctaaatcagacactaaccccaaatgagagaagtgccaccataactgcagcccgagagtttggcgatctctggtatctcagtcaggtcaatgacaggatgacaacagaggaaagagaacgattgcccacaggccagcaggaagttcccagtgtacaccctcactgggacacagaatcaaaacacggagattggtgccgcagacatttgctaacttgcatgctagaaggactaaggaaaactaggaaaaagcccatgaattattcaatgatgtccactataacacagggtaaggaagaaaatcctaccgcctttctggagagactaagggaggccttgagaaagcatacctctctgtcacctgactctattgaaggccaactaatcttaaaggataagtttatcactcagtcagctacagacatcagaaaaaacttcaaaaacttagaaaccctattgaacttggcaaccttggtttttcataatagagataaggagaagcaggcagaacaagacaaacgggatttaaaaaaggctaccgctttagttatggccctcaggcaagcagactttggaggctctggaacacggaaaggctgggcaaatccaatgcctaatagggcttgcttccagtgtggtctacaaggacactttaaaaagattgtccaaatacaaataagccaccccctcatccatgccccttatgtcaaaggaatcaatggaaggcccactgccccaggggacaaaggtcctctgagtcagaagccactaaccagatgatccggcagcaggactgagggtgcctggggcaagcgccagcccaacccatcaccctcacagagccccgggtatgcttgaccattgagggccaggaggttaactgtttcctggacactggctcggccttctcagtcttactctcctgtcccggacaactgtcttccacatctgtcactatccgaggggtcctaggacagccagtcacttgatacttctcccagccactaagttgtgactggggaactttactctttcacatgcttttctaattatgcctgaaagccccactcccttgttagggagagacattctagcaaaagcaggggccattatacacctgaacataggagaaggaacaaccgtttgtggtcccttgcttgaggaaggaattaatcctgaagtctgggcaacagaaggacaatatggatgagcaaaaaatgcccatcctgttcaaattaaactaaaggattctgtcccctttccctaccaaaggcagtacccccttagacccgaggcccaacaaagactcaataaaattaaggaactaaaagcccaaggcttagtaaaaccattcaatagtccctccaatactccaattctaggagtacagaaacccaatggacagtggaggttagtgcaagatctcaggattatcagtgaggccgttgtccctctatacccagctgtacctaacccttatactctgctttcccaaataccataggaagcagagtggtttataatcctggaccttaaggatgcctttttctgcatccctgtacatcctgactctcgattcttttttgcctttgaagatccttcgaacccaacgtctcaactcacttggactgttttaccccaagggttcagggatagcccccatctatttggccagacattagcccaagacttgagccagttctcatacctggacactcttgtccttcagtaagtgaatgatttactttcagctgcccgttcagaaaccttgtgccatcaagccacccaagcactcttaaatttccttgccacctgtggctacaaggtttccaaaccaaagctcaactctgctcagaacaggctaaatacttagggctaaaattatccaaaggcaccagggccctcagtgaggaacgtatccagcccatactggcttatcctcatcccaaaaccctaaagcaactaagagggttctttggcataccaggcttctgccgaatatggattcccaggtacggcgaaatagctaggccattatatacactaatttaggaaactcagaaagccaatacccatttagtaagatggacacctgaagcagaagcggctttccaggccctgaagaaggccctaacccaagccccagtgttaataagcttgccaacggggcaagactttcctttatatgtcacagaaaaaacagaaatagctctaggagtccttacacaggtccaagggacaagcctgcaacccatggcatacctgagtaaggaaactgatgtagtggcaaagggttggcctcattgtttacaggtagtggcggcagtagcagtcttagtatctgaagcagttaaagtaatacaggaaagagatcttactgtgtggacatctcatgatgtgaatggcatactcactgctaaaggagacttgtggctgtcagacaaccgtttacttaaatatcaggctctactgcttgaaggaccagtgctgcgactgtgcacttgtgcaactcttaacccagccacatttcttccaggcaatgaagaaaagatataacataactgtcaacaagtaattgttcaaacctacgccactcaaggggaccttttagaggttcccctgactgatcccgacctcaacttgtatactgatggaagttccttcgtagaaaaagggcttcaaaaagtggggtatgcagttgtcagtgataatggaatacttgaaagtaatcccctcactccaggaactagtgctcagctggcagaactaatagccctcattcaggcagtagaattagaaggaaaaagggtaaatatatatacagactctaagtatgcttacctagtcctccatgcccatgcagcaatatggagagaaaggggattcctaacttccgagggaacacctatcaaacatcaggaagccattaggagattattattggcggtacagaaacctaaagaggtggcagtcttacactgctggggtcatcagaaaggaaaggaaagggaaatagaagggaactgccaagcggacattgaagcaaaaagagctgcaaggcaggaccctccattagaaatgcttatagaaggacccctagtatgtggtaatcccctctgggaaaccaagccccagtactcaaaagaagaaatagaatggggaacctcatgaggacatagtttcctcccctcaggatggctagccaccaaagaaggaaaaatacttttgcctgcagctaaccaatggaaattacttaaaacccttcatcaaacctttcacttaggcactgataacacccattagatgaccaaatcattatttactagaccaggccttttcaaaactatcaagcagatatagtcagggcctgtaaagtgtgccaatgaaataatcccctacactacacaccatacatttcaatcaccatacatttcaatccctgtatctttaacctccttgttaagtttgtctgttccagaatcaaagctgtaaaactacacatcgttcttcaaatggatccccagaggcagtccatgactaagatctaccatggacccctggactggcctgctagcccatgctctgatgttaatgacaccaaaggcaaccctcctgaggaaatctcaactgcaccacccctactatgccccaattcagcaggaagcagttggagcggtcatcggccaacctccccaacagcatttgggttttcctgttgagagggggtactgagagacaggactagctggatttcctaggccaactaagaatccctaagcctagctgggaaggtgactgcaaccacctttaaacacggggcttgcaacttacctcacacccgaccaatcaggtagtaaagagagctcactaaaatgctaattaggcaaaaataggaggtaaagaaatagccaatcatctatcgcctgagagcacagtgagagggacaatgatcgggatataaacccaggcattcgagctggcaatggctatgctcttcgggtcccctccttttgcatgggagctctgttttcactctattaaatcttgcaactgaaaaaaaacccctgcaaaaaccaaaccaaaatgaaaaactggttaacacgtctaatatttccataactcattttttgctgctatgaagagtaacagcacgtactactctcccaaagtgagcaattaataataaagttcaatgaactgtttatactccatactgacattctgtcccattaaataccaattccctaagtatttattaaatgactattacatgaaatgtaccattttaggagctattgggtatagatagaaattttatagtgggagaaaccacaggaattatttagcttatatttcttacttcatagttgagaaaaaaagtacatagagacaattgcctagtatgggcaataatgtcctaaccttatttccaaacaaaaatacattttagaaattagggcatcattcttgctgcctttcattatatgaagtcaaggataagggggagggagaagataagaaggaaggcttgcttctgactctatcaatagaataggattcaactcaatctgtggaagttttactgaaacaaattagcaggacctgatgaacaggggataaagaatgtgggtccctgataaattcaatattttataaagaaatagtggaatgatgaagtgaattcaaataggaaaattgattgttttactgtgtatattatatatggacataaaagaggcctggaatgagaacagaaagtctgggttccaggttcatctttgaaccttagtgaactgtgtaatgctggcaagttactcaactcagaaaggttcctcagttattcagtaagatgattgtctaggtaattacaaatatcaaatctggcagtaagttcccaaaatcccatgggaagtgttttgtctagaaataaggaaaacctatctaaatattaaagcggttcaaaaatggcaggcatatcattacaaaatagtgtttataagagcaacttctaccttgagattgatctaaatatcctcaaaatcttgctatgaactctttgtgtcctccccccacattcatatagtgaaaccctaatcttcaatgtgatagtattcagaggagcagcctttgggacataactaggtcatgagggtggagtcttcatgatgggattaatggccatataagaaaagacatgacagaggtgagctctccaccatatgaggatacagcaagctggccatctgcaaaccaggaacagggccttcaccaggaaccccaccagctgacatcttggtcttggactccctaccttccaaaactgtgagaaataagtttctattgtttaagccacccagtcaatagcactttgctacagcagcctgagtgaattaaggcagtccaaaagctttgtcatacgctgcaagctgcacaagtctagcaggcctagaacaatgggtgtctgtgggggagcccaggagtcgatggcagagagcagataaaagcaagccatgccaactgctgtgggctgtaggagcctctgatgggcattaagcatgagatgatccaatttttatttagaaaggtttcttcgatggctgtgtgggggacagatttgagaagttgctacggagactagctgtggtagctcaggtaagaaattatgcaggcttcaaggcaggcagtgggggtggcgaggagacaatgactgtgggatttacttaagaggcagtgtcaacacaatttaggaggagtgggaggaattttgagatatcacatccaatccgttattttacggatgacgaaactttgggctagacagattaattttcttgtttaagaatcgaaatttaactactggcaagactaaaattatttgagtctcctgatttccagggctctttttcctcccaacacagtatgcttttttacatgttaaaatgtttttgcatgttgaagtatattatccagtattagccatcttcgttattaaacacttctgtataggctattctgtcatcatgcattactccatatttctactcactacatggttaattagctggttaattccattaggctaatttaagaaaataataatatacaggtttattttgagacttaaacattcttttatcctacctcctactctattgtaaatagaggacaaaaagtgctgggtttaatgtcacctcttacagtgatggtatttttctggccaatatgcatgagatttgggaagattaagtggcagaaaacctggagccagggtacagacaggctctctaacatctagagcatgctgtccaatccagtaatcactaaccacaggtggcaattaagcccgtgaaatgtggctggtctgtattgaaactacatgagtacatacatgtttggattttgaagatttagtaggaaaaaagcagaatatgagctacctcattaattgtttaatattcatcatatgtttaacactttagatttattgggttaaacaataaacattaaaattaatttcacctatttctttttactgtttaaaaatatatctactagaaaatttaaaattacatatgtgactcatattatatttctgtttttttttttttttttttttttgagacagactgttgctctgtcgcccaggctggagtgcagtggtgcaatctcggctcactgcaagcactgcctcccgggttcatgccactctcctgcctcagcctcccaagtagctgggactacaggcgcctgccaccatgcctggctaattttttgtatttttatagagatgggatttcaccgtgttagccaggatggtctcgatctcctgaccttgtgatccacccgcctcggcctcccaaagtgctgggattataggcgtgagccaccgcgcccggcttatatttctgttagactgtgctgctgtagaaatttacaatgtatctcaaggaagtaaggcattcataaataacatcacaggggccaggtgagcagtaaaagaagctatggagataaactctgtctaggctaatcagaatttacctaggctccaatccctcaaaagcagagaaagaaaatcccaataaaataaagtcctggattccatttcaaattcagaatgagaaccatcccctgaggatttgatccccaaaaaaatccttctaaggatgtatatattccttaactaataatccctaaaccctgcaattcaggagtggaagttgtattttcctaactcaaagggatccaggatatgcctgatgaggggttcctttaagtgagaatcttttgcctatgagggccttgcagaatgttttgagcagcttcccaaaaatgtgaggaatgcctcaaggctggctacacaaagcgctctccttggtcctgagacctgtctttggttgagctcagactctgttccccagccagtgaactgaacccctccaccttagccctgccctgctttatttactctgcctaaacccgcctcctctccacccccatactctgtgcacatcccaatcactgcactcaccatgttctaggagggtatatttatacattcatctgtcccacaggatggagctccttgaggctagaacagcattctgtattcatctttgtgccccaaatacgcaggtaagaagtaggcactcaaaaaatgaataaatgtctacgtaatacatgtaactgtgctactttgtgatgtgtcgtatctcctttgctgggcagggaataaatttgagaaaaagatagatttaagatgtgattttcttgtgggtagagatgtgcatgcatgtgtgtgtgagtgagtgaatatatgtgtgggagacacagtgataaatttcagaggaggggcagagccagggcaaagacccagagtaggtaacaacaaggtatgttcagagcttgacaagttctgttaggctgagcctgggggttgtgagggaggagtcagaaataagccttatctgccaagtaaggagattggctgttatccttgggcagggaacaggagcttcagaaagatcttatttagaggactgacaggataaaaggagtattttagggaacagtgtgctgcaggagaggatcaaaggcaaaaatagcatttaaaaagttactagggtattaaatgagggggaaaggctccctgggcttgatttttgaggcagagtttgcagaaaataagaattggggccgggcgtagcagctcatgcctataattccaacactctgggaggccgaggcaagtggatcactggaggtcaggagttcgagactagcctggccaatatggtgaaactttatctccactaaaaatacaaaaaatagctgggccctgtagtcccagccactcgggaggctgaggcaggagaatcactggaaaacccaggaagtggaggaagcagtgagacgagatcgtgccactgcactctagcctgggtgacagagtgagactccatctcaggaaaaaaaaaaaaaaaaaggaaggaaagtctttaggggcagccaaggaatgtatgagctatcaggatgggggggaatgtattggcaagacaggatttagggaagttttgctatgtgatgcgctgtgtaaaatctctatgtacaaaaacctaagtatgatcgacattatttttccaaggatttcacaattgggctgatgagtaatagagtgtgactacagcctagaaactgaccaaagagagcactggtttgccaagttttaggttggttgtattgttattactgctctgagcctctcagcagttttgacttcacttatttaagtcactattcttgttactgctctttaaatttgtgtagttatgaactctttttttttttttgagacggagtctcactttgtcacccaggctggagtgcagtggcatgatcccggctcactgcaagctcctcatcctgggttcacaccattctcctgcctcagcctcccgagtagctgggactacaggcgcctgccaccacgccctgctaattttttgtatttttagtagagacggggtttcactgtgttagccaggaaggtcttgatctcctcaccttgtgatccacctgcctcagcctcctaaagtgctgggattacaggcatgagccaccgtgcctggcttagttatgaactcttaaatcttgttcttagtcaaggagccagcctatttttagatcttatttactataatgtgtatttcatctttttattattaaaaagaacattattaatggtttgataccacttttgaataaataggaagcactccccctcacaatatgacgtttcttactgtgatatttctatttccctgctttaaagcacaatagtctctgacccatctccttgtttccacccttatccctacaccgaggtcatagcgatcatttaaaacagaaacagattatacatactgttcaaaaccctctaatagcatcacataatatccaaaataaaatctgaattccttgtcatggctaagttctacatgactgggttcttttctatgtgatcaaaggcattccctacctttcctcacatcggtgatcacgcttcacccaaaatggctcctttagttccctgaatctatcaaattctctcctgtctcagggcctttacaccagctattccttccactggagagccttccctcagatatacctatgcttcaatcctcaacattcaggtttctgctcaaatgtcactttctcaaatgttccctctatactctctgaaatggcgttcctgctttcacctccataaccttactctggtgtttatttatcatctaaactcactgttcaaccatcctaagatgctcatggtgatagacattatcagtgttcctctgggatccccttgggactcatccttctgggaacagtgatggcttccttctctgtaagtatctgtgactctttactcatcaggttttcctggagtgctcagcctaggtgcgaggataggcctgaagaactaggagctgacacattggctgagttgatgtctcagtcaatgaccaatggcagtttgtatataaatatcccagctgccttaaccacttgggtgggacaatattgagacacattctaaaccacctcccgaagcttgcagtaggattggttaccagttgcccacagtggttacctttcattattttgccctgactgtctttctttattttttgtctcacatacccactcccctgttggtgcctccaaaaaaaattacttgcactcaaatgctcatctcagagtttgttttggggataatccaccttaacttattgtttttcttttttttcttcttctttctttccttctatctttttaaatgatttaacatatttgaaatcagaatcaatttccagtagacagcttgtcataatttagttggcagcatctttcttttcatgatcttacataaatttgggtacttgttgattgggatccccaatagtatatatgttatatacacaagtttgtctgtttcattcttaattcttgggaatgtccctcatatgctgaacagagcctagcacagaatagttgctttataaaaatatttgattgaatgtggaattgaggggtgctacgatttgaatatgttccccaaagttcatgtgttggaacctaatccccaatgcaacactgctgacaagtgggaccttaaagagctaattatgtgactagattagtgatattatcttgggagtgggattctgataaagggatgagtttggcccccctcctctctcttgcccttctgccttctgccaggggataacacagaaagaaggcctttaccagatgcaggccccttgaccttggacttcctaggctccaaacctgtaagtctttgttctttataaattacccagtctcaggtattctattatagcaacacaaaatggtctaagaaaaggtgatagtatcacctctcttcaacagccacaacttactccccagagacatgggtcatggaggtcccttacagaacagactagcttcatcaccaaactctggagggccaggaggcaacactggtagatgcaagaagcaacagcactattggactgattggatcagggctctctccactgagtataagatttgggataggctttgggattggagaacctaaaatgtcatatttatttcactgtctttttgacaactcaggagaaggagggctgaacccatggagggagatactggacttactgctaagatgacagccttaaataattaactagagatttattaagatgaaacaagaattgtaactcatgattgtagagcaggtcatattgaccactttttttttttaagtaagctggctaaggatatttttgaaacatgatgaaatacacatttaacaaaagaaaatatttgtctttttgcatttccagtgcaaacactacagtgcaattatgttgtttgtacagacccattagtcatccatagcaaggctactaaaagacaatctcacagaatgcagagacatctgtgctgttgccctgagagtgccttagggccttggggacccctctcaaagcagagatgaaaagaccactcactccctgactgcagagtccttaatgcctgagtagcactaacaacaaagccaccattatacaaagtattattattattttaagaatattccttcctctaagaattgacctgagatgacttatttctacacagctcatcaaaagcttacaaatttaggttgccagtcaaaattgtgtattttgctaacttggaatgcaagatattgcatcctattggcaagtccctggagtccaccagtccattaaaataatgagggttgtaatgtttccccagcaatattaagagcatcttaattacttaatctccagtgagtggcatacacataatttttatgcataatctaatcaaagagctactgaacagtgttctgtgtttaagtcaaagaacattttccttcaaaagtgagatttggttggccaatatcagaactactaaagaaagtaaatacggagtatcaggtctgcctggatgctggaaaggttgctctgcctgtgtttttgtaaattgatttacaattctatggaggaaaaagattttttcaaataacattcttgggaattgctataaaaaataaccacatacagaaatgttttttacttattttgtaaaattgttacgacaatgttttacttgacaaatatcaacagaataatggtggttaatttttcctgaaaatcaactttcattcccacttgggggaaaaaaatctgttccttccttaaacatcctcatttcagtcaatagcatgacccagttgtttgaaccataaagctaagagtcctgaattgttctcttttccccaaaccatttatctacagtagccacaaatagctataaaatataagtttaaaaaaaccctaacactcaccaatacctctaattcatcagtaaatctcattgattatgcctcaaaatatattccaaacctattcatttctctctaagcctgcatgccactttacaccaagccactatttttttcccacacatgtatttttttaaattatacgagtgacatgtgctcattgtaaaaaaaaaaaaaaaatccaaacattacagaaatacctctcttcccatggccaaccctgatcatacttctcagagataattcttcttgtttcttgtcttgaacatcataacaacctcctagctgcttccagtgctgtgttggccttctgtatccttttctacactgagcaccagaatgatgtctttaaaatataaaccaggttatgccacttccattttagaatcctaaatcctgtcactgatgtatttttcttcttctttcttctttcttccttctttcttcttctttccttttttaattatttttatttttattttgagacagggtctcactctgtcacccaggctggaatgcagtggtgtgattgtgatcctcccaccttagactcctggagtagttagagctacaggcatgtgccaccacacccagataattttaaattttttttagagagacgggctctcattatgttgcctaggctggtcttgaactcctgggctcaagcaatcttcccgcttcaaccttctgaagtgcagggattacaggcatgaaccactgcacctggccttccattttcttctgtatgatttattgtctgttccttgctactagaataaagtcttcatgaaaagaaagacctcttcttattttatgctatgtccccagctcttagaacacatggcaggtgtacaattatttgttgaaagaataaatgaatacatgaatgagttttccaccatgtgctaggcattgtgcaaagcactttacaagcaatgttgcttttgatctctagcaacttcatgagaccaggaccattataatctccattgcacagaggaacattgggttcatacactagtaagtggtaagtacaaccactccacatgagtccaagtgtgatgttggattggtcgtttaatgttttaaagttttagttttctctctctagttatcacatacatgtccttcccaatttcttatataaatcagagaatccttgaaaataaatcacagaatcatccagccaccagttaccttagcccttaagtctagctcccaattccactatatatgaattatccaacaaggaaatatccaacaatgcaaaaatgtataaatataaataggatttccaagaaatatataaatggtttaacattacaaaatatactaaagcaattcaccatacaaaagaattaaaggggaacaactacatgctccttcattaaatactcattcgaagtgactactcattatcttagcctaataaaagacatttatcaaaaacttacagtaaacatcccagtttagagtgacatgttaaaatcaagaacaggaaaaggatgcccattatcactacttctactcaactaaaggcaggtaagataaaaggaattaaaggtagaaataatgaaattaagaggcagtcaaaaccataaatattcagacattatgattagctgcaaagaaaactcaagagcatctatagacatatagatagaattcatagagatttagcaattatgctggataagaacaacatttaaaaagcaatttcaggctgggcgtggtggctcatgcctgtaatcccagcactttgggaggccaaggtgggtggatcacctgaggtcaggagttccagaccagcctgaccaacatggagaaaccccgtctttattaaaagtacacaattagctgggcgtggtggtgggtgcctataatcccagctactcgggaggcagaggcaggagaatcgcttgaacccaggaggcagaggttgcagtgagctgagatcatgccactgcactccagcctgggcaacaagagcgaaactctgtctcaaaaaaaaaaaagcaatttcacttctgtatatcactaacaaactgttataaatgtaaactaaaataatacaacatacaaactatccaggaataaatataatgaaagatgcgcaaacctattgtgtagaaaattataaacttttattgaagggttttagagagctctgctccttgataagaattgaagccttattatcataaagatatcagttatctccaaattaatctataaattcattcaattccaaagtcccatgtaatttttccatgaaattggataaattgattctaaaacacatattaaagagcaaagggaccatggatctctaaatgtgcaaatatgatggaaagattaagaaaaggtctgaaagaacagatgtgaaattgagaatacttgttatccctggtgaggagcataagtttaaagaagacgtgggcaacagaagtgaagaacttttatttcttgtctatgtaattatgaattacatttttaaaataataataacacatttacagatcacctgagtaatatacaaagtacaaggggatgaaagatgctgtatgatttataaagatatcagctagaagcccaagtacaaagagaaaaaatgatgtatacaatagtacccccagcttatccatgtcatcaactatggtctgaaattattaaatggaaagttccagaaataatccataggttttaaatggcatgtcattctgagcaacatgatgaaactctgtgctgacctgcaccatctcacctggcaaatgagtcttccctttgtccactgtactgtgctgtaggctctaccaccatgttagtcatttatatgatctattcttgacatccaaccatcatcatgactccatgatccaagatcagtcaaagcagatgatcaccattctgaggtatggccaaaagggcaatgataatctgtggctacatcacaatgcctacgttactcacctcgcttcatcacatcacgtaggtattttatcaactcacatcatcacaagaagggtgaatacagtaatacagtacagtaagattttttttttttttttgagatggagtctcgctctgttgcccaagctggaggatggagtgtagtggcaccatgtcggctcattgcaacctctgcctcccaggttcaagcgattcttctgcctcaccctgctgagtagctgggactacaggcatgtaccaccacatctggctaatttttgtagttttagtagagacagggtttcaccatagtggccaggctggtctcgaactcctgacctcgtgatctgcctgccttggcctcccaaagtgctgggattacaggcataagccactgtgcccagccacaataagatattttaagagacagaaagaccacattcacataatttttattacagtatgctgttataattgttctattattattaatcttttactgttcctaatttataaattaaatcttactataggtatttatgaatagggtaaaacagtgtatatagggttcagtactatctgcagtttcaggcatccactagaggtcttggaatgtattccccacagagaagagggggctactgtataccttttttacaaatgtcccaacagcaggatgttcatggctgtggcctaacctaaaaatctgtttaacgaggagctataaaaaaattgttctttttttgagagagagaaaaagactgttttttaagaaaataattattacagcctgccgaaatacagctatgtagaccaaagaggagccaggtggcttgacttatattagtttataaaaagcatacacaatgaattagaactccatagaggttgacggtacccaagtcagaagacaattttagcacagcctggagctcctacagagccctctgctataatgaaggcatcattattttgtgttacccccaaaattcatatgttgaaatcccaacccttaacgtgatggttgaggtgggcccaaagagatgggccctttgggaagtatttaggtcatgagagtggagccttcatgatggaattagtgccttcgtaagaaaagacaatggaccacacttcttttctctgtattctctgccatgcaaggatacaactagaagaccgctatctgcaaaccaggaaggggaccctcaccagacacagaatctgacagcacccagatcttggacttcccagccttccagtctatgatattctattatagtagcctgaactaagacatgatgcaggaaaagaagagggcaaaagtctccattgggagctttactttgcaaacaacattgtaagcataaagtatgtacttcatgggctttggttttattgtcttttttttaaagttctgttcagattttcattatccctaaatcatttcacaacatgagaggattaaaaagtactcttttgttaggtggggccaacttttttttttttttttgagacaaagtctcgctcttgtcccccaggctggggtgcaatggcacgatctcatctcactggaacctccacctcccgggttcaagcaattctgcttcagcttcccgagtagctgggattacaggtgcctgccaccacgactggctcatttttgtatttttagtagagacaaggtttcaccacactggccaggctggtcttgaactcctaacctcaggtgatccacccacctcagcctcccaaaatgctgggattacaggtgtgagccaccgggcccggccaagtggggccaacattttaatgaatgtaaactcttctatctttttgctggtcttagagattctatttatattagacatgtcatggggatgcagagtggaaaggctcattgttttctctctcctatcttcagtaaatgcacctccattggtgattaaattaggcttaagtatttctaacaaaaacagtttctctagttgggttttcccctccatctgctaaggtggtctatttggagagggaaagaataaagctaaaaacattactcctttggccatcaaggcctcccgcttcaccttaaatagactacatatggtagggagggtggggaagccctttcatccctacggattggcttgtcctgacaatgtgtaaaatctcagggaagaatcttgtgattgaaatcttcataagccaaagctaaaaaccacaaatgttccctttcccctcaaatggtctttagctacacttgctttttaagggcttaaagcttcttgctggctagctggcggctcacacctgtatttccagtactgtgagaggccaaggcaggaggatcactcgagcccaggagttcaagagcagcctgggcaacatggtgaaaccccctctctacaaaaaaaaaaaaaaaaaaggcctgacagtgcatgcctgtagtcccagctactcgggaggctaaggtgggaggattgcttgagccagggaggtcgaggctgcagtgagccgtggttataccactgcactctagcctgggtggcagagcaagaccttgtctcaaaacaaaaaccaaaaaacccccaaaacttcctgccactgtcccagtattcctacgtatttttttttttctttttaaagagaggtagggagatgttggtgataggttggtaggtttcatacagaagcttcgccaatgtcaggtgatgtctaatgcattcacacacagattcccatgactggtaatgcacagagctcctcctgaaagcttgcatctctgaagcctgagccaggctttcaagtacaataactgcataactgctggcgctctgctgcttcagccccagcgtatgccctgaacactgtaagtcactccctcctgtcaaggggagtttgtttaccctattagcaaaacgaactgagtactgcctctgggtatgtgaatgcggcagatgtctggtcaggaattctgcctgaggccaaagtctaaaggcactgccagatgaggacatcacaaaactcccagcagttaaagggctgtagcaggggaaatgacttaacagattgcatgaaattgtttaagaatcattctaggggttgtcatgcttttcagatttgcatagatatgtctataagctcaggacctggctgacaaccaccagagttatactcacctcctaccatattttgtctagttcattacaccttttatcctagccttacaagtaggatgtaggctattttagagtttttgaaatggctttcttttaccaatattccctccccattgccccacaccttccaatccatcaatctattcatccattcatccatccatccatttaatcaatgcttatctaggtcctatgggagacagaaatgaagcagatgtaagtcttgcctttaatgtaaccgaagtgggaatcagatgttcataaacagtgcttggcacattgtgagcactataaacatagcaacatagataattacaataaaactaggagaaagtcaagagtcccataaaagaaacacaaaagctaccaggacaggtgtttgagagaaggagggtgacctctgatatgatacttgaaggaagatcattttgacacttggtgattggcaatgggagatgggaagacattcctaactaaagaaaagtgaaagaaaacacagaagtggaaaaatatggaacacgtgtgagaaagaaaatctcatttttctggaacacagggcatagaagcgaaataacaagagaaacttggaaaggtatctaggtctcagattttcaaagacccctgaatgaacaagttagggaatttgagctgaaggcaatggttagcaaccaaaatttttttattttcgacctaaaaaaaatggaggtataattccaaacagaaaaatgtacagatcttcagtgtccagtttgatgagctgtgacaaatgtctgttaccatgtagctccaatcaagatatagaacatttctatcactctagaaaattccttcttgcctcattcaaatctgctcccctcccattctccagtggcaaccgaggttctgaatttcattcctatagatgagttttgtctgttcttgaacttcataacaatgctatcatataacatgtgctcttgtttctagctgctttcgctcaacatggtttttagattcatccatgttccagatgttttaagcaggaaaaataatatgattataactgtactttggatgattaatctgctctattgtatggaggcctttgaaaatgtaaatgtaatttcagcagcatatttcagggaagtggttatctgtagaaatgtacaaagagattggattcagacaatagtggagtaggtagaaggctacaaatctagtcaattaaacagagaaggagaagtgagaagggaaaaaaaagatcactataaacttaccctccccagttaaaatctctgcaaggcctaggcttaatcagctgatactttcagcaagattaattaactgctgaaaattaacagccctgaaaaagaggcacaggtacattcaaatgaaggagcaggaataaatacaaatgaacatgacccggggttgcagggtgggggatataagagaaaaacagaaatagcagacagatttcaaagattaaaatatttctaaggctaaaattcacgtgaaacaaaagagacccagaatagccaaaacaagtttgaaaaagcagaacaaagttgaagaattcatacttcctaattttgaaacttacttcaaagctgcagcagtcaggacagtggacactgctgtgagtagacatataaatccatgaaacaaaattgagagtctctaaacaaacccttacatttatggtcaactgattgttgataagggtgtcaggacaattcaatgaagaaagaatagttttttcaacaaatggtgttgggataagtggaaacctgcattgcaaaagaatgaagttagaaccctacctcaagccacatacaaaaactaactcaaaccagatcacagacctaaatataaaagctaaaaccataaaactattagaagaaaatatggattagaaaaccattttttatatatgacatcaaaagtacaagtgacaaaagaaaataacactcatattgggcttcctgaaaagtaaaacctttggcacttcaaaggacatcatcatgaaagtgaaaagacagtgcacagaaagagagaaaatatttgtatatggggcaaaatatatgactagagacctcacaaaataatatacacatatggaaaataagcatatgaaaaggtgctcaatatcatttgtttttaagccattgaaaattaaaatagtaaaatgcaatatacatctattagaatggctaaaattcaaaacattgacaatttcaaatgctggtgaagatgacacagtttggcagttccttacaaagttaaacatagtcttaccatatatgatggttaattttatatgtcagcttgattgggccatggagtgcccagatattttgccaaacatttttctggatattttgggattaaattaacatttaaatcagtagtctgagtaaagccgatcgccctccctaatgtggcaggcttcatcaatcaactgaaggcctgaattgaacaaagaggctgaccctcccccaagttagaattcttcctgtctgacagtttttgaattgggacattgactttttctgcctttggacttgaactgaaacattggctcttcctgggtctctagtttgccagccttcagaccaaaattacaccatcagctctcctggttcccaccctttagactcagactagaactaaatcattagctctcctgggtctccagctttccaattcatcctgcagatcctgggagccagtctccacaattgagtgagccagccaaatctctttattatatatgtaaatgtacgtatatatgtatatgtggaaatgtataagtatttgcattatatatgtatatgtattacatatgtgtatatacgtatatgtattatatacgtatatatttatacctcctattggccttacttctctgtagagtcctgacaaacagaatcatgtaattcggcagtttttctcccaggtatttattcaattgagttgaaaacgtatgtcaacataaaaacctgcatacaaatgtttatagcagctttactcataatgccccaaactggaagcaacccagatgtcttttaatagatgtcttagtccgtccaatctgctatagcaaaataccacaagctgggtggctgataaacaacagaaatatatttctcacagttctgtagactggaaagtcccagatcaaagcctggcagatctggtgtctgatgagggctgtcctttcactgtaatcccaagtggagaaaggagtgagggatctttctggggtctcttttataagagcactaatcccatcgtgagggccctgtgtcatgacctaatcagctcccaaaggccccacttcctaatatcatcaccctgagggttcagatttcaacatatgaattttgaggaacataaacattcagaccataacaatgggtgaatgggtaaccaaattgctgtatatccataataggatattattcagagataaaaatgaatgagctatcaagccttcaaaagacaaggatgaatcttaacatacagtttgttggcaaagctgtatcctatttagaaatatggactaacaattcagaaactcctatacatatatactgaaattggacagttaagtacatggttggtggatggtaggagccaaatttctcactgctggaatgggagtttacagacaagaaaggggaagaggctagaaaaatccttgtggtaatagatttaagttggagactttgatacaaactcatccttagccaaatatacagatggttacatataggaatatttatagatatgtgtatctacacaggttatcatgcatttccgtatttcctacttctgtttgctgaaaaaaaactagtagcagtgagcacacctagtgaccaaatcttggtttctaacaccatttaccaataaaataaaccagggttccttggaaaaatgactcattctagaattggggcaggaaatgtgcaagatgagcctggagcatcttaagaacttgctaaacaaacaaacaaaactctaaaacatcaggatgagagaatgccacagagacatgggagccaattgaaagagctcccaatggcctaactagaataatttaagaaataagaaaaagtcaaattggattataatcccaagtataaaataaatatccatgagtacaaactgatataaacaaatgattaaataatgaagagagacatatgttctgtgaaaaagaatttcaaataatttatgcagatactccaccctcaaggaggtagagtataacccactatttcctttttttttgagacaggttctcactctgttgctcaggctggagtgcagtggtgcgctcatagtacgacgttggcttcctgcaacctccacctcccaggttcaacggatcctcccacctcagcctcccaagtagctgggacgacaggcgtgtgccaccatgcccagccaaatttttcgccatgttgcccaggctggtctcaaaccatgtgcctgccttggcctctcaaagttatgggattataggtgtgagccactgcatccagcccaaccctctacttcttaagtgtgaactgctcatagtgacttccttccaaagagtacagtatggaaggattgggtagtctctttacagtgcagaaacctgataaatactacctcagccaggtgatcaaggccaacatcaacagtgatgtcatgttgatagtatatatttttgatatgatatgatgtgatgaaaatagcactctacctctgtggccttagccctagtcttatcatgagaaagacctctggcaaatcacaatagagggatatcttacaaaaaatatctgatcaattcacctcaaaactgtcaaggtcatcaaaaacaaggaaagtctgagaaactgtcacagccaagaggatcctagggagacataacaaataaaatgtaatatggtatcctagataggatcctgggacagaagaaaaaaacaagattagtaaaaatctaaggaaatatgaataagtatacagttaataataatgtattcatattgattcattaattataacaaatataccagccaaatgcaagacgttaataataggggaaactgggtgtggtatttacgggaagtctctgtactatctttgtaatttttctataaatctataaatgttctaagaaataaaatttaaaagatgggcaaaggatttgaacagacgtttcttcaaagaagatacacaaacggaaacaagaacatgaagacatgctcaacatcattagtcattaagaaaatgcaaatgaaaatcacagtgagatatcacttcacatccattaagatagctataatagaaaagctgacaatagcaagtgttggtgagaatgtggagaaaatgaaaccctcatacattgctaatgggactgtaaaatggtataggcactttgaaaaacagtttggcagctcctcaaaatattaaatatagagttactatatgacccagagattccactcctatgtatagacccgggagaactgaaagcatatatccacacaaaaacctgtccattcatgttcatagtagtattatttatcatagacaaaatgtgaaatcaactcaaatatccatctactgattaatgaataaacaaaatgtggcatatatccatacaatgacatgttatctggccatatggctgccactttacaacatggatgaaccttaaaaacattacgctaagtcaaaaaaaaaaaagacagttaaaaaagccattccactcatatgaaatgtccaaactaggcaaatccacagaaacataaggtagcttagtggttgcagaggggtggggaaggggagaatggggagtgactgtgtatgggaacatagcttcttttggagatgacgaaagagttttgaagtcagataatgatgatggttgcacaactcaattgtgcactttcaaaggtgaaatgtatcatatgtgaaatatatctcaatatagctgttattaaaaaataatatagtgccaaagacagccagcccctacattaccctgagctaaaagcagtaattacatacctacaagctcatggtgctggggagtataatctttgaagagacttacatacactgacctgataatttagcatttaacatatatatatttttagcatttaatatacattattttatttaatccttatagtcgtgccaagaggtaggtgttattacctacagtttaaagactaggaaagtgaaacaggcttaaacccaagctgacttattccaaagctagctctaaaccattacattttaatgtattataatgattatatctcaacctctcaaatcttgtatttctcatcaaagtgtcctatttactccataaaattatcttcaaaagttttattttatttttcattgacaagtaatagttgtatattttcattaaaatgtgatgtttcaatacatgtatatattgtagaatgataaaattgggctaatcaacatatccagcacctcacatacttataatttctttatagtgagaacatttaaaatctaagataatatgaaaaaggcttgtaacatattaattattaatttattcttccttctcgtattcagacagatacatattcaggatgaaaaccacacagctaaaacatacaaacagcatgcccttcttggttccacataagaaaacctgaatacagaggctgtgaacaaaaggatgctaaaaaagatttacaattgcttcaaatttaaatacttttccaattcagaggtgacttaattttattttgtaaaaatatgcctttttggttatttgtgggatttttttggggccccaaattgtgctttttattattggatatttaagtaacatgtaaaggctttaggtattgctgtggtctgaatgcatctctcaaaattcatatgttaaaactttatcaccaatatgatagcgttatgagcggaggcctttaagagtaatttaatcatcagggcagagctctcatggaggagactggggccctcatagaagggcttgaaggagtgggcttgttcctttccatctcttctgccatgtgaggacacagggttcaaggtgccatcttggaagcagaaagtaaccctcaccagtcactgactctgtccgtgcctttctcggacttcccagcccccggaactatgagaaataaatttctgttctttataaattaccagtctcaggttttttgttacagcagcacaaaaagaccaatataggcataatacatatcagattcatgattctgtcccatgctctggttaataaagtgataggtggagatatatttaaagacatttacacagaaattttataagactgcaattgaaccactaatgtaaaagtcttatgaaatgatatattctgaatgtctgcttattttaaaaaggttagatatgaagatatgtgtttcataaacagaggtctgccagtgtaaggtagagatgaaagactagctccacatcagataacttgaatttaaatgttagttctgcctcattggacgaattgcttaattctccaagttttgctttccccacctgtaaaatgaatattacaacttttacgacaaagagttgttactgagaattaaaaagaaaagcatgcaaagacttaacagggtgcctggcaggcagtgagtgtcccacaaaaagtcaaccaaaagaaaattcaccacaatctcaaatactggtgtaaatacctaattgcaagctaattgtccaagattgtacagctggaattcaatgccagatatatctgagtccaactcatttgactacaccatactatattataatgatcatttgtcatcttagaacaaggcttgggcgatgcttaagtaaagctgggacaaaaagctaaagattttcccattctaggttaaaatgtgttatcttccatattattttcgtaccccagagcaactaactgtatccaaggataagtgagaagaaactactgaaatgattttgaagagagatgtcatatacctaacaccaaatgttaaaatagcatttactcaattctttggcagtctgctactttgattagaacagaaaatgggaaagtgaaagtgactttctcaactaattatgggcatgttaaatcacacagactataatattggagatacctacaaagaaaggtacctgcttggatccaatcaaatattttgaccactatatcaaaaagcaactgctttgaaatatcatcctgctaaaactctaagttcatatttttaacatataaaagtgaataatcacattagatatgaaatatatatatagtattttcatttttaatgtatatctgattaaagcttgaagaatgcatttgatttataataatgtggaatcttgtaagacatctgagtttttaagactgattaattcttaaattaataactgaggttccacctataaagatcctaaagcaaccactaacatatttgttttcctgaattcattgtttgctcagtaatagaattattcatacaggaactctgtaggagtttggggcagctattttgtaagcagagttaagctagattttggaaatgtgctagaatttttcacatttaacatttttgcaaaacattcttatctgtaaacccaattttcttttcttctatatctgaaggagagtctcacctttaccaagcagagaaccatgtgaaagaaaaatcatatgttgtaagtgaaaatttttttgagaagttaagaaaaagtgcttatacaaatgcaatgtgtcatataaatagtcatttctccaaaatggttggaaaatgtggtaatccacttaaaacaaatatttttattactaaaagttaccatataaagcacacatgccttatctatcaatgtcaaacatttatatataaaaagactcaaaccctaacgtatggtacaggttaagttttgttcgtgtttagggaagtagttcgaatcgtctcattcctcaatatcaccattatgccttttaaccaccatgatatagagctggatgaaaacacacattatttgagctctgaggttgactctcttccagttagagggggctaataggattgttatttttatcttgatcctcaccaggtttctgatgttctgcctagatcccactgtgttatatttagcaccggctcttcctgcaggagcctcagccacgtggaatcacactttcatacccccccccacccccccgcctgctcactactgctgaatacataatctaagccctgaaacatggtttctaaaagattaatttctgctcacagaagtatgggtgaaaattttcctaatgtgacttgacttaccaagtgaagtttattaaaccttgtcagaaaccatctgacttgctaaatacatacacacgcatacatacacacttctgaaatacagtaaaaaatcttttccgttgaaaaagaggaaagattttaggggaatagatgaacagtgtgtattttaagcatccctctacagattacatttatgtgtatgtttggtttgtaacaacagcagcccaataaatgtgacgagacatatatttcactcaaatgttgctatggaatcctttcctgacttgaaaattaaatttctccatctgtttgcatgacttcgtgttcattgtagtgccaagggccagctgatctaacaaacatgctgtagaacaaattcctcaaaccagaaaaaaaaacaagcgtgaagtagagcaaatagcatgagaaaccgtatatttctgaaagattcactctccgaaagcacattaatgttgataaaactggtggctttacttagggatatattcttacatgggcaactaatcatacaaacttctcaatagtacaatgaacatgacctgtgtaggaaatgctgtaaatccaaatattgaatagcattaagatactaaaatagggggatttaacagataatttagacatgacttgagctgattttaaaagtaccaagaagaaaataaaccttattaaaaatacttaatgtattctatataattctctttgtaaaaccaatttgaagatttttcaataaaaacagaagattgtgatacagatgatgcattcaatactaattttaacttatttataatgtaattcatgttagcaagtttcagaatattcaaacaagcctattccaattaattccaattatctgagtaattttatatttataggattataattacaaaacatctaatttataagtgtatccacccacatacattttgacactaatatataattcttaattatttaccttagcaaatttgtacatttatcagaatagtatatagaataaattactgataattttttttgaaaatttaaaaagtaacttatgaaatataggccactgaaaagtctttgaaagtattttcctttaaaacatttaatcactttttaaattcatttaattaaattctgtttctaaagagaaaccagcagatgttattagctcactgtgtttatcctcttcaaatatatattgttcccaagtagttttttagttatttgctcatatcacatttgtagggtttgttttcttctctgacttgcaggcaattttatttaaggacgagttttccttcccctagtacactaagaagttctgagagcaagaacattattgtgccttacctgaatgtttgttaaaatggcttatccatctttaaattctcccacattagttaacctgttatcttataattaagcatctgtttgctgattagctttaacatatagactcatactacattttccctttgaagccattatgcttcaggtacttagaatataaaatttttaaagagggtagaaacttgaactttagcatcatttggagaaaacactatctgataaacaaaataataaatcttacttgagaattttaggttcatgaaaactaagtagttatttaaaaattattttttagcaaactattacgattaaaagagtcaatccagctgtctgaaaatattcggtaatagaatcattcattctgatgaaactgctgacctattttctaggcttgatgaagaatttaactgtagttctctatacttatcattatttttctatcataaaattatctcaaagtgccccagagatatgatgtaactgatgcaaataattactagaaaggaatttaatagagtattataatcttgagaacaattcagcctgagccaatgttttccaaagtttcaagttaaagctgttctagacaagttaggcttcgggtgcattcttgtatatttggagggctttctttgcgtcttactttctatgccaactctctcagatccctcggaaatagaatcagagagtcaggcaacatagaatgttttcatgtattaccaaaagactggtctcactgtaaaaaggtcatttccaaaaataataagcatggatagcaaagaaaaaatattttaaggagagtgattaaataaatagaagaagaatatttggtcaaaactttctaggataataaattagcaatcatgctatttctgtaaacattaataaaatcgtaacgtttttcagatagccaaatatttaactcattggccccgatttccttaatattataataaataacttgttttgtgtgctccaaagtagcagtaaaagtagactgggtaaacatttgctgtatctatttctgtaatacatctcccacattatatatacaagttaaagcttcaagactgtggttaattttaagcctagtcaagatggcagcacacccacattcccaggcttaaaatacagcatctttcataactgcttcttcacaccttacagaattcatatatacttgccgtcatattaataatatttctccaaccaggttctacttacatctgcctccaaaatttgctcattttttaatgttctgatgttatccaccagaactggatttcttctttaaaacactgagaaatttgttgcagacaatagatttgaatgagctagaataacagaaatgacctgctagctcctataaaaacaaaatttgttttcttcagatgaaaaacaaaagctagaccaaggataactcagatttccttctttttacagagactctgagaccatagcaaatataagtagttgtaggatgagaattaattttacctagcagatattaaaggctaagcctattggtcataaaaacacgttagtgtaacagagtaagagggcaatgaagaaagggaaaagttgggctaaaattttattttcttggacatttcttggagaatgtggggacaggcactttgctgttttagttcttgttcagcaacctcccccactgccttctactctgccactacaaccagtaagcagggagggaataaagtggaagggatcaaaaggtctttgactctcactccacactaagggcatgctattgtacgtaaatgtcttcagggctgcacagagggagatgatatgttttctttgtaggctgaagagaacttgatgctagaaaagtgttctcaaaagtttgggataaaaaaacatatttttacaaattgaattattaacaactatgtgttgaatatctctaggtgtaaggcactagaattgccactgtggatatacagatgattaagacactgcctcttattccagattactcagctggagtccaagttccattaatataacagttatatagatgacatggagaaagtgcttctataatagtacagtaaaaatatgtttacttgttaatattacccaaagtgatctacagattcaatacaatgcttattaaaatctcaatggcattttaacagaaatagaaaaaacaattctataattcacatggagccacaaaagatcatgaatagccaaatcaatcttgagaaagaacaaagctggaggcatcacacttcctgatttcaaaatatattacaaagctacagtaatcaagacagcatggtactggcataaagaaatacatataggccaatagaacagaacagcaagcccagaaataaatccacacatatacagtcaactaacttcaacaaaggtgcaaagaattcacaatggggcaagaatcttatcttcagcaaatggtgctgccaaatctagatatccacaaatgaataaacctggtttctgatcttatgcacacaaaaccccattcaaaacagcttaaagacttaaaggtaagccctgaaactgtaacacacctagaaaaaaacataagggaaaagctgcatgacattgatttcatgaatgtgacaccaaaagcaccagcaaccaaaatgaaaaagaataagtgggactatatcaaacaacaacaacaacaaaaaatctgtacaggaaaggaaattatcaatagagttaaaggcaacctatggaataggagaaagtatctgcaaaccatttgcccgataaggagttaacatccaaaataaagaactcctataactcaatagttttaaacaaatctgattttaaaatgggctaaggacttgagcagacatttctccaaagaagaaagagaaatggccaataggtatattaaaaaaagttcaacatcattagtcattaaggaaatatgcaaatcaaaactacaatgaaatatcacctcatacttgttagaatggccattacaaacaaataaacaaaagacaagtgttggcatggacgtggagaaactggaaccattacacacttcatgggcaggcaaaatgctgaagtcactacaaaaacagtatggagattcctcaaaaaattaaaaatagaactaccatatgatccagcattcctacttctgggtatttgcccagaagaattgaaatcaacatctcaaaggaatatgtgcattcctgtgtttcttgcagcactaatcacaatagccaagatgtagaaatgatctaaatgcccatcaacagataaatgggtaaagaaaacatatatacataccgtggaatactgttcagccttaaaaaaaagaatattctgtaatatgcaactacatggatgaacattgaggacattatgctaagttaaataagctagtcacaggaagataaatactgcatggttccacttataggaggtatctaaaatagtcaaattcatagaatcaaagagtacaatggcgattgccaaggggtggaagtaggaggaaatggaaaattactagtcattgggcataaagttttaattaagcaagatgaagaagttctagagatctgtcatatgccattgtccctaaattcaacagtactgtattgtacactgaaaaatctgttaagagggcagatcttaggtgttcttactataataagagagatacacatttttaatgtgaaaggctgcttcaaaaaatggcacaaggacatggatatgaaatgaatctcctctgagatgtagacctgttcagagggtatggggagctacagctaccttactttcaatttcagatccaaatctaccatgatgagtagctgctccccctacaatgggctaatactaaagcacaggggacaataaggtggaaactaacaaaaatcagttatggttgttagcacactggtgccctaccagcaaatcctgcactaggaaggcaaggggaccactgagtgtgcaaccaccttatccattggcattgccccagataataacatgagggcaagacttgtgaacttgtgacttgtgaactacagagctaatggttgtcactggtgtgtaagtgggtgggcaacatgcatttggacttaaggtgattgataacttcctaaggggtagggaatgtttaatgatgttacatgggaagtgccatggcaaccacgtttattctaaatggggaatacacgctaagctcagattttaagacagtaattcttaaaatgtttttaaatgtccttcccatcaatagagagtacaaaacaacagtgatgccagcagagaaaaacacagccatgaaacaaaacacccagaccagagacacagaactgcttcatatagccattttcaggcaaagcagggagccagtgttttgccatgcatattagagaaaagggaagcctcctactgacataacctaatacttagtactgaaaggctattcctgaaaagtacatgagagtaagcagtcttaatgactagtaactagggctctgaagctagaagaaaacattccagtggaacacatggagaagaatctagtctgaatgagacttcagttgcagtcactagaagttatcattaagacttgatgaggaacaactgataactgaacaaaatctagtgtgtacactcaaaatgtgttacgaatagtttggtatagtgtatcatttcaatgaccaaattatcatctcataaaaccccaagcaaagcacctaaggtttaatgtagtaatacctggagcaagaggaagactctacctgaatattataattaatgttctgttcccagaatgaacaacaggccatctgaattcattatggagtactctcttaatgaggctcatttctgcgttttctcaaattagtgtaagaaattaagcatatgtagaaagatgatgaattcaaatatgaagtgagatttcaattcaacaaacactgagctatgagtaggatgctgtgctaaatactgtggtttcacagatgaaacaaatcccttgctccaaatgcaaggtaagtccacaagcaaagatatgccatgtgatgaaacaggtgccataatagaaacagaaatcagagcacagtatgggtatgcgtaggctcatgatcaatgattagggagagctcaaagaaagtatgggttccaaagagagtacaaataataattttcctgctcagcagtacttgtaggcaggagatgctttcttcttgttttgttccttactgattagcaataatgaaactctgcagctttagatataaaatatttattgagagtcagtacatggaatagcacagatgtcatgaattaaatacattattgagaacacaaagtatcagaaagctagaaggctagccacccagcccagactgtctgtctcagtaaggttagattagtttcagtaaagatataacaagtcctctgattttgactgaggagcccctatctagcagcacatatagctatatatgtgcctatttcctccttgtagtccatgagctacttgaaggcaataactacattatgcagcagagtgcatggcatttagaatgtgttcagtatttgaatactgaatgaatcaatgaataattctatactgaaagcaccactctctcccccaaaaataattaataatgatttttaaagcccttcaaggtcttctacagcccttcaaggatctgtcacaacttctaggaatcaggacattcatccgcgtgatggatgtaagtgaaaggtccactgccaatgttagcacatttcctagttgtttgacctttaagaatttaagactactcaggaaaagcctggaaataaaaggatcatagtcttcaagatactcatgaagtcaccacttcattctaacataagcactgcctacagaaaaagaaaagacatgagagataataatggaacagctgtaaaatctctttctggagacaactaatcaagctatagctcatcttgggttctatgttaatcttatatacagccaaagcaagtatacggaaattagttaaccccatgaatatcactatttttattccattgtcctccaaacaaattttttcactgcatttgatatgtacaaacatgtgaagtttaaaaaatgtcatctgtccagtctcttgtagaggaaataatgtgaactgaaatagctaaaggacaaaagaagtaagaggaagagaaacatacctgaaagaatctaagttactgacaaacccccaggaacatttcaatatgactgtattagccagacctatgatagaggactagtttggttttgatattaaattgccattgtccaaactccagtgatccacagttaacctgagatggacacctgttggtgtttggttgtttaagacttaggcctggtttctaagcacatcacaaatttctttctgggagttacttcaactttggatataatctggagaggccctgaatccagttccctgactttttccagccaaggggcagccatgtgatcccagcttggtcaattaaatacctgcctggaatttaaatcctgagcagagtgcctaagagactaaaatggctggggttcatccatttcatcactgtcatcctgaccagctggctcctgctgcaagagaacacctgttgttcctgcttcctgctctctggaggtaacctggttcctgaccatgttcacatctggtcccatagtcatcttgtaagttctatgctctcctagtggccttctaataaactgcctttcctttaagttacttaggcttttttggatatgtgcagggcaggtgtggctggtacttgctgccctcctgagaagagttagtgtaaggggttacagcagaggttcctgttctcatgttactttaaaacctggcagcctgagtctaccaatgagcatctgtaaaccatgctggggtatgcctgcctaattctcttttcctattttccttttctatctctctcccaagtaaggcccagttaaagaagaatgctaggcaaggacagtatgggaaaactggggaaaagaccaccttaatttctttctgcaatctgccttaaacgcaagcaaaagtcagtcattacataaaagctactgttgagcaactctttccaaaataatgtttactaccatgatcaatgacactgaaaaccgacagttaatagaataactttgagagagagtgggccaggtgcagtggctcatgcctgtaatcccagcactttgggaagctgaggcaggcagattacttgagcccaggagttcaagaccagcctaggcaacagggcaaaacctcatctctacaaataaatacaaaaattagctaggtgttgtgatgtacctgtagtcctagctacttggaaggctgaggcaggaggatcaattgagcctgggagattgaggttgcagtgagccatgatcacgctattgcactacagcctgggagaccctgcctccaaaaaaaattgaaagtgaatggaacatacagactgaaaatatatctgcatattgtattcttgaaacagaaaatttgagcattaggaaatttatagccaatacaaacacacacacaaaaactcacttagcaaacaaaatgaatcccagacaactgtagcactttcacacttgggaacctggtttgcagtctcatgagtagaaaagcatatgaaaataataattaaaatatgttagagacaagtgtcaacaaacctagctataaatatcctcagtgagaacattaaatttcctttgggaaattattgagagtggattgtaccagtaagaatggaaaagatcaaattaagaaatggaggcaacatttcagaaagtaatgcaatcccaggagtccctcaatattattatagccttactggcattcctgagacacaataggctggaaaagaccttggatggatgagaatactgatgcccttcaatacccagagcaagagtgccatcctctctcattactcaccaaccttacagcaacacttttccagtaccactgagaattgacagcactttaaatgctcagaatttcccctcccagcaatataacagactacacattctgaaatccaactaaacacctaaacattctggaaaaatacaaaagccatgattataaaagaatagctaagctataagtaactaaaagggaaatatcagaggataacggtagagtgaaaacactaatcccaaaaggctacattctctgtatgacatccccccaccttgcaaagaaaatccaaagccaacaaattaatttaaagcaattctgtttcccttagaaacaaacttaaatcttctacaaagatatgcaccctcatagcagaccttacagaattcatacagataaagtcccaacaaatataatttcataatttttaaaaaatttgaattacatgaaaaagacatcatgagaaagaaccagcagaatacactgcacagacctgccaagacttcctatgttggaatactaaaatcaaaatataaattaagtgtgctattaaaagattactgagggacttgaatacttaagcaaagagcatgaaactatgaaaaatgaagccaatttgaaaaagaaccaaatagaacttcctgaaaaaaatgatttaaatgaaaaaatgtattggacaagtaaacaagttaataagacacaggtaaaaagattaatagagaactagaagccaaagttgaacaaactaccacactggaacagagaccaaaaaagagagagaaatacatttaaaaaggttgagaatcataaaggatacaaataaaggactaacatttataataggacctctagaaagacacaactgtgaagatgagggagaaatgatacataaagaaatagtgcctaagaattcttcagaatagatgaaatacacaaattcatagactcaggaaacaaaacaaataagcaggattcaacacacacacacacacacacacacacacacacacacacacacacacacacacacacaaactccaagacacacactacggtgaaatttcagaaatccaaaggcaacgaaaaaacctcagagccagacaaagcagtgtggtggataaagagaaggaaagatgaaaaaggaaggacaaagtaggaagaaagaatagaaaatggaaggaggattatagaaaagaacggagaaagacaaaggagagaaaaaaaaaatacttgaacaaacaggaaagccagactctccttaggggtaaatgcggctaacaacctgaggatgcttttgaggtacagctagctgaacctgaaatcctgacattaagctgaaaggctaatgtgtttccagactggtagtgcttctgactcctgatagcaaaataaaatcctccctaagataggtctcaggatttcaaaatactaagttcaatctattataaccacataaataatattcccaaacacctagaaacactagccaccacaaaggaaaatcagtagaacaagagatcaaggtgcccaagaactgcagataatataattatcagatattaatgtaaaactactatctctgaaatggttaaaaaagtaagtgtggtaacaaaaatgataaaggaacgtataatgaaatattatttgactttaaaaagaaggaaattctggtgcatgctacaacatgataagcctcgactttgctaaatgaagtaagccactcacaaaaagacaaatacctcacttatgtgaggtacctagagtattcaaaattatagaggcagaaagtagaatggcgacaggagctggaggagaggagatttgtttaatgggtctagcatttcggtgctgccaaatgaagagttctggagattggttgcctgacaatgtgaatgtacttaacacaactgacgggtgtacttaaaaagattttaaaatggtgaattttatcctatgtgtattttatcacagttaattttttttttaatcacaaaggataagatgtcacaaaagtgaccaggcagatgtacaaaataataaatgaaacttctgaaaataaaaaatgaaatcattttactttacaaatttttttaactcaatatataagataaacatattagacacagctaaagagagtattattttagaaagcagaattgaataagttgcccatattacagcacgagcagagggaaaatataaaagagaagtcataaaaaaaataacgcactggtttaaattagtctagtttgggtttcaaatggaggagagacaattttcaaaaaagtaatggctgagatttttctgtaattgatgaaagacttgaattcactgatgtaggaaccacaatatatatcaagaaggttgaataataagaaatatacaccaagacatattaagataaaactacagacttctaaagataagattgtttacagcagtatctcctgtaatcacacaaaattcaaaacaatccaaagggataaaaaattgtaacactcacataatttggaatactgttggcattgaaaacaatcacattgaataaatctcataaacataacattaagtgaaaattagtatgaaattaattatatgaggtttaaaaatatttaaagttatgtaacaatttagaaggagtttacctattattttctattattttatctctctgtgcagcatgatagataatttattttgacctaatttccaggtcattatttgccctttagctgcaccatgtgcagctattgagttttaaacttcggttatttgttttgctgtttctataagttgtatttggtttctttttaagtcttaaatgtccctttttgggtttcctattctctgtagatttgatcaagcttatttttcatttctttaaaaatggtaagcatactttacagttattttatagtctgtatctggtaattccaacatctgaactttttgaggatctggttttgttgttgatgtagctactgcttcttgctcttggggtctagttttcttgtgtgattggtcatcttttgttgagacaggatgttgctctgttgctcaggctgagtacagtgacatgatcatggctcactgcagcctcagcttcctgggctcaagtgatcttcctgcccaaagttccaggctagcaaatagtagttctaagaccagaatctaggccacctatctctctaataaatgctcctgagtactgggttactctccctctcttttgtatgtatgtaatatcccatttcataataaaaagaagtcagccatggtggctcatgcctgtagtcccaagttctcaggaggcaaaggcagaaggaatgcttgagctcaggtgtttgagtcctgtctgggcaacacagagagaccctatctttaaaaaatatataaaagaatatacaaagaactgaaaaggagaaaaatgcttggcactaataccctaaggactaatgccattaaaactattttgcaagaagattaaatatacgtatgtagctatatatgtgtcattgtaatgaaaaataacatcaaaaagttaataatcatttgcctgtgttacttttactgtcttcccatttttcttcatttttcccaattgtctgcagtgaacatgtattacttttaaactcaagggaagaaaataatactattttaaaatactcttgcccacagcttttttatttaattgcatatcctaaatcacatggtaaactgcatagtctaattatatcttgcctgggagataaaagacaattttgagtattgctgtgatccaaaaagggccttcactgtgtatccaagggcaaatagcgtttcaaatttcaatagaaaatgttaagggctagtaaagagttgctttgagctggtcttaacattggctttgaccatttttttttttctttttttttttttttgagacagagtttcactcttgttgcccaggctagactgcaatggtgcgatttcggctcacttcaacctccgcctcccaggttcaagagattctcctgcctcaggctcccaagtagctgagattacaggcatgtaccaccatgcccggctaattttttgtatttttaatagagacggggtttcaccatgttggccaggctggtctcaaactcctgacctcaggtgatccgcctgcctcagcctccaatagtgctgggattacagccgtgagtcactgcgcctggcctgccttgaccattttttacatggctttagggtaatctcatcctatctagggcagacaggtatgctgggctcctctgtctatagccaccccattaaataaggagagatacagatggactgttatgcaacaatcaataaatagacttcacagtgcagagattagttgcctgactagcaagtttagacaaacagtccttaaatgggagtgtgaggctcctgctgacattcaggaaagcatctgaggctgtgaaggggtgcatggtaacttcaaattgtgtggtgctaaacccacagagtcacagaagatctgcatcagttttgctttccggaggagggagattttgctttccagaggaacagagattttttttttttttgaatgtagaaaaaaactctttagaaacaggtaaaggtagagtttggtagcattatccagtcaaggaaacactaacaaggctgggcgcggtggttcatgcctctaatcccagcactttgggaggctgacgcaggaggatcacttgagttcaggagtttgagaccagcctggggaacaaagtgagaccccatctctatttttttaattaaattaattttttttaattagccaggtacagtggcatgcacctgtagtcccagctacttggaaggctgaggcagggggattgcttaagcccaggagttcgaggctgcagtgagctatgactgcagcattgcactccagcctaggcaacagaatgagactccatctctaaaaaaggaaagaagaaagaaaaaagaaaaccctaaactaacagggcaatctgtagaggtaccctggcatctaagtactagcactgagtctccagattaagcaaggacaggaacagcaggctctgctcagagcagcccaagtttagtatcacttttcttaaaagcttaatataccaaaaacaccccatattgactctgtaaagtaattacccccaaattacccactatcaatttctaggaaaacaaccagaaaagcactgtggaacactcacatttcaatgacctctctcatcacctgctccccttctttcatttactagtttgtgaattggaggaaatcactaactttccctaagcttcagttcccaaagggatataattatacttgcctcacagtgctgttgtgaaaatgaaatgacacagtggctgtaatgcccaccacagtgtcctgcagaggctctggaagtgtgttccaatgtagtcccatctattcaaccactgagtcacaccacacacacacacacgctctcacacacacacacacaccccttggtgttgcctaggcaaacagccttctaaagtcactcctgtctggctcaggacctccaaaatcaagattaagaatccaaacatattaaagtgagaattgggagttattttcacttcagatttcatttaaaaataacaaattacaaaacagtagctagaaagggaacctgctaatgcatattcatgaggactgctaaccagaaataaagacaaaagctgtcttttcttgtaacattaaagtgaaaacaaataagatacggagaaggcagcacgacagccagaacgatacttccatttcagggatgagggaatttgatataacttatgacaagggcttggtaacacacaacccctgggaattctaatgaacacaacccctgcagacttcaacggagttccatcttgaacatccaagggcagtcatctggctcatggcgaatagatctaactcttggctacttagccaaagaagattgagaaatttgaataaaaattaagaacaagagcttttaaaatgtttctttttaataaagtacagtcccatacttcattaacttcagtttatgctgaagacaattatacatcttccttgagccaagaacctggggaaatataagaaataaaaactggaatttcttcatggttttatgttgggggtgtgtgcttggtttttttcttctgactctcaaaggagtctgagatgcgtaactgaacttcctactctgaaaaatgaccatcatgataacataccattaagactcagggctttgaagtggtgcatttggtttaagaacaggttgatgagaacatgaggtatttgattttctgttcctaagttagttcaccaaggataatagcctccagctcttataagtgggagctaaatgataagaacttatgaaaacaaagaagggaacagcagacactggggtctacttgatctgggagggtgggaggaagaagcagaaaagataactattgggtactgggcttaatacctgggtgatgaaataatatgtacaacaaaccccaaagacatgtgtttacctatgtaacaaaccttcacatgtgcccccaaatctaaaataaaagtcaaaaaaacccaataataaaaatttaaaaaagaggagagaacccttgatccagccaaagaaaaacaaaaacaaaaccaaaaacaaaaaacaggttgggggtgaactggtagaaaaaaaataaagaattgttgaagggcacaagatgggagatgggttgggggaaagaaaagctcctatttccatatgaatttgaaggttgtatttgaacttttaaaaacctgaaagtagctaaaaaaaaatccatcagttctgttaagagtcctcttcaaaggaaaggagatttggcagaggagatttgaaggcagtgataagagtaaaaataaaaacccttttcatgtttttacctctggtgcttaaactgcccttggattacagcgcttttctcactgtaaagtattaatacatatgaatcctgagcctcctgttaaaacacatgctctgattcagcaagtctagggtaggacccacaactttgctttctaacaagctctgggtgatgtccacactgctggtttattgaccaagctttcagtaacatgtaaagaaatttgagttgcagtgcctactattggttcatcacattaggatttggaagttttgtctcctaagcccagtttttgtgcttgacagatactagcttgccctagttacctcatgggttatcgtgaagctgaaactaaacaacatgccaagtgctttatgaagtgtgaagaacaaagaatagcagtatgatcaccatcatgtaaaataagatcataaaagacaaatgactttctgaaggacccaaagtaagaggcagaactagactcaaaatctgtagcatctgatcctaagcaagtgctttgtactctaaagtgttgcaacttaaggcgttatgaggaatagatcacatttatttccatcttacatttgtctccctgtcttaatgcatatattacattgaaaatgtacacattaggatgattcaaacccttgtatttccttagaggggtagagatcactgctgctgtactgtcctctgatgcactctaggaggcgatcataacacccaatatacctacagtctaataacaccactgttaaccaggtaagtgtaacggagacgggtgtaaacacccaatcacatgagagaatttcagagatgtgacacaaaaatgtgggctagaataatcaaggaaggctttgtggaagaaaagcatgcattttgaggtgtgctcaaatgagaaaggtttaggtagcttagaagaaaggcaaggctgacgctgagcaaaatcacagtgggatctccaatgaattagtcgtcctgcacacagtgtcaaggactatatttaatacccagaaataatcctacatgttagaacacagaggccaactcaactgattcagtagattagttcaataattagaaaggagggagtcctggaataccagggtaaggactgtatactttatccttcatgggatggagggccatttgaagaatttttagcttggcagaaacaggaatgaaattgcgtatttgaatggaatgtattggagagaatatggaaggcatgagaataagtaagtatatctttacaatttatgtttacagcagtggatccatttaatcaagtgagatcttaaaacacctatctgtctgtctatggagagagagggagggagggagggagggagagagggaaagagagagaatatgaatatcaatgcgagtatgtaagcagagctgttttaggtcagggtgtgatggggcccctaggctgagctgtcaggagtggaaccctcagttccgcttggtttcttttgaaagaaggtcactgtaatgtgataagtatataaggatgcaggaactagaaatgaaaggaaaactatacagacatgttttatgaaggaaggatagatcatctgatggctccaatagctccagagccaggcattttggcttctagtccagtgctcttcatctatatcattctaactctgccaattactatttgacaaaacatgccaaggagaaaatgcaaagtccaatacacttattagtaatttagaaacttcttaggcacttccttttatcttccaacactgaggtcttaaaagagcatttagtctaaaaatctagtcccatatccattctttaatcttatctctaagcaattaattgattggaaataaattattcttcaaagttgcagacttcctgttgttgttccaaagcctttcatagtgatctaatacttgtattttaacaatgtcatcacaagatctgagtcacaaaagagattacattgggcacaaataagtggcccaggataggaggtgttaatttattttcacatagaatatagagatggcctacagtaagattgaaaactatgataataataaccagcatatttataaacatacataaagacacctattcaatgaaagaagacctgttgttatatgttcagaaaagcatacaaggtgtgtatgcacacaaagatactatgagaaagttatagagaaaatgaatgtggatatagtgattattttctttcatttgcaaaacaaaacatacgtgtttgaatttctaggaggtatcatttctgaaatcacagacttcagagttcttaaatactctaggaagcatctcagtaactcaggacagaatgttctcttctttttttgaagattttcagaagtttatattttacaagcctcttccagtgttttattgtcaaaagcagaggagttcccttgatataaatctaactatcttccttctttaatgtatgtccatttcctcttgttctatcctctgaacatgggcaaaaaatttccaatatcctcctcacaaaaggcttccacttatttgatgacagaaggtaagttatgcctcaattttcttatcctgaacaattccagttcctttaacttttactcagagaagttgctcctcatttctttaatcactatagtttccctttggaatcctgtccaatttctccacataccttattaatagggactaaaagtatggaattatttaaaattgcaagtgatgcatcttttattaacctccatattctaccaaaggaaatgttgtaataaaaatggcaataaagtgctctctgtattgtccaattggtcagaactggtgcactatttatggattacttataggtaattactggtaattataataatagctatgatgcaatgaacgtttcctatgttccaggcactgaatattttgctgtcaaatcctggcaacaactcaaaaaggtaggtatttttatcctagtttttttaaaatttatttatttatttactttttattattatactttaagttctagggtacatgtgcacaacgtgcaggtttgttacatatgtatacatgtgccatgttgatgtgctgcacccattaactcgtcatttacattaggtatatctcctaatgctatccctccccctccccccaccccacaacagggtgtgtgatgttccccttcctgtgtccaagtgttctcattgttccattcccacctatgagtgagaacatgcagtgtttggttttctgtccttgtgatagtttgctgagaatgatggtttccagcttcatccatgtccctgcaaaggacataaactcatccttttttatggctgcatagtattccatggtgtatatgtgccacattttcttaatccagtcgatcattgatggacatttgagttggttccaagtctttgctattgtgaatagtgctgcaataaacatatgtgtgcatgtgtctttatagcagcatgatttataatcttttgggtatatacccagtaatgcgatggctgggtcaaatggcatttctagttctagatccctgaggaattgccacactgacttccacaatggttgaactagtttacagtcccatcaacagtgtaaaagtgttcctatttctccacatcctctccagcacctgttgtttcctgactttttaatgatctccattctaactggtgtgagatggtatctcattgtggttttgatttgcatttccctgatggccagtgatgatgagcattttttcaagtgtctgttggctgcaaaaatgtcttcttttgagaaatgtctgttcgtatcctttgcccactttttgatgaggttgtttgattttttcttgtaaatttgtttaagttctttgtagattctggatattagccctttgtcagatgggtagattgcaaaaattttctcccattctgtaggttgcctgttcactctgatggtagtttcttttgctgtgcagaagctctttagtttgattagatcccatttgtcaattttggcttttgtcgccattgcttttggtgttttagacttgaagtgcttgcccatgcctatgtcctgaatggtattgcctaggttttcttctagggtttttatggttttaggtctaacatgtaagtctttaatccatcttgaattaatttttgtataaggtgtaaggaagggattcagtttcagctttccacatacggctagccagttttcccagcaccatttattaaatagggaatcctttccccattgcttgtttttgtcaggtttgtcaaagatcagatggttgtagatatgcggcattaattctgagggctctgttctgttccattgtctatatctctgttttggtaccagtaccatgctgttttggttactgtagccttgtagtatagtttgaagtcaggtagcatgatgcctccagctttgttcttttgacttaggtttttcttggcaatgtgggctcttttttggttccatatgaactttaaagtagttttttccaattctgtgaagaaagtcattggtagcttgatggggatggcattgaatctataaattaccttgggcagtatggccattttcacgatattgattcttcctatccatgagcatgaaatgttcttccatttgtttgtgtcctctcttatttcgttgagcagtcgtttgtagttctccttgaagaggtccttcacatcccttgtaagttggattcctaggtattttactctctttgaagcaattgtgaatgggagctcactcatgatttggctctctgtttgttattggtgtataggaatgcttgtgatttttgcatattgattttgtatcctgagagtttgctgaagttgctaatcagcttaaggagatttggggctcagatgatggggttttctaagtatacaatcatgtcatctgcaaacagggacaatttgacttcctcttttcctaactgaataccctttatttctttctcctgcctgattgccctgggcagaacttccaacactatgttgaataggagtggtgagagagggtatccctgtcttgtgccagttttcaaagggaatgcttccagtttttgtccattcagtatgatattggctatgggtttgtcataaatagctcttattaatttgagatatgtcccaacaatatctaatttattgagagtttttggcatgaagggctgttgaattttgtcaaaggccttttctgcatctattgagatagtcatgtggtttttgtctttggttctgtttatatgctggattacgtttattgatttgtgtatgttgaatgagccttgcatctcagagatgaagcccacttgatcatggtggataagctttttgatgtgctgctggattcggtttgccagtattttattgaggattttttcaccgacattcatcggggatattggtccaaaattctcttttttgttatgtctctgccaggctttggtatcaggatgatgctggcctcataaaatgacttagggaggattccctttttctattgattggaatagtttcagaaggaatggtaccagctcctccttgtacctctggtagaattcggctatgaatccatctggtcctggactttttttggttggtaggctattaattattgcctcaatttcagagtctgttattggtctattcagggattcaacttcttcctggtttagtcttgggagggtacatgtgtcggggaatttatccatttcttctagattttctagtttatttgcgtagaggtgttttaccattttctgatttaccatcagaaaatactggtggtagtttgtatttctgtggaatcggtggtgatacccctttatcattttttattgcatctatttgattcttctctcttttcttctttattagtcttgctagcagtctatcaattttgttgatttttttaaaaaaccagctcctggatgcattgattttttgaacagtttttcgtgtctctatctccttcagttctgctctgatcttagttatttcttgtcttctgctagcttttgaatgtgcttgctcttgcttctctagatcttttaattgtgatgttagggtgtcaattttagatctttcctgctttcccttgtgggcatttagtgctataaatttccctctacacactgctttaaatgtgtcccagagattctggtatgttgtgtctttgttctcattggtttcaaagaacatctttatttctgtcttcatttcattatgtacccagtagtcattcaggagcaggttgttcagtttccatgtagttgagcagttttgaatgagtttcttaatcctgagttctagtttgattgcactgtggtctgagagacagtttgttatagtttctgttcttttacatttgctaaggagtgctttacttccaactatatggtcagttttggaataggtgtggtgtggtgctgagaagaatgtatattctgttgatttggggtggaaagttctatagatgtctattaggtctgcttggtgcagagctgagttcaattcctggatatccctattaactttctgtcttgttgatctgtctaatgttgacagtggggtgttaaagtctcccattattattgtgtgggagtctaagtctctttgtaggtcactaaggacttgctttatgaatctgggtgctcctgtattgggtgcatatatatttaggatagttagctcttcttgttgaattgatccctttaccattatgtaatggccttcttggtctcttttgatctgtgttggtttaaagtctgttttatcagagaccaggattgcaacccctgctttttttttgttttccatttgcttggtagatcttcctccatccctttattttgagcctatgtgtgtctctgcatgtgagatgggtttcctgaatacagcacactgatgggtcttgactctttatccaatttgccagtctgtgtcttttaattggagcatttagcccatttacatttaaggttaatattgttatgtgtgaatttgatcctgtcattatgatgttagctggttattttgctcattagttgatgcagtttcttcctagccttgatggtctttacaatttggcatgtttttgcagtggctggtgccggttattcctttccatgtttagtgcttccttcaggagctcctgtaaggcaggcctggtggtgacaaaatctctcagcatttgcttgtcagtaaaggattttatttctccttcacttatgaagcctagtttggctggatatgaaattccgggttgaaaattcttttctttaagaatgttgaatattggccccactctcttctggcttgcagagtttctgccgagagatccgctgttagtctgatgggcttccctttgttggtaacccaacctttctctctggctgcccttaaccttttttccttcatttcaactttggtgaatctgacaattatgtgtcttggagttgctcttctcaaggagtatctttgtggtgttctctgtatttcctgaatttgaatgttggcctgccttgctatgttggggaagttctcctggataatatcctgcagagtgttttccaacttggttccattctcctcgtcactttcaggtataccaatcagacgtagatttggtctattcacatagtcccatatttcttggaggctttgttcatttctttttacttttttctctaaacttctcttctcacttcatttcattcatttgatcttcaatcactgataccctttcttacagttgatcaaattggctactaatgcttgttcatgcgtcacgtagttctcgtgccatggttttcagctccatcaggtcatttaaggatttctctacactggttattctagttagccattcgtctaatcttttttcaaggtttttggcttctttgcgatgggtttgaacatcctcctttagctcagagaagtttgatcgtctgaagccctcttctctcaactcgtcaaagtcattctccgtccagctttgttccgttgctggcaaggagctgtgttcctttggagaagatgtgctctgatttgtagaattttcagcttttctgctctggtttctccccatctttgtggttttatctacctttggtctttgatgatggtgacgtacagatggggttttggtgtggatgtcgtttctgtttgttagttttccttctaacagtcaggaccctcggctgcaggtctgttggggtttgctggaggtctacttcagaccctgtttgcctgggtatcagcagaggctgcagaacagtgaatattgcagaacagcaaatgttgctgcctcatcattcctctagaagcttcgtctcagaggggtacccagccgtgtggggtgtcagtctgcccctacttgggggtgcctcccagttaggctactcggaggtcagggacccacttgaggaggcagagtgtccattctcagatctcaaactctgtgctgggagaaccactactctcttcaaagctgtcagacagggacatttaagtctgcagaagtttctgctgccttttgttcagctatgccctgcccccagaggtggaatctacagaggcaggcaggcctccttgagctgaggtggactctacccagttcgagcttcccggcagctttgtttatctactcaagcctcagtaatggtgggcgcccctcccccagcctcgctgccaccttgcagatcgatctcagactgctgtgctagcaacaagcaaggctctgtgggcgtgggaccctccgagccaggtgccagatataatctctgtttatatataatataaactgtgtgccgtttgctaagacctttggaaaagcgtagtattaggatgggagtgacccgattttccaggtgccatctgtcacagattcccttggctaggaaagggaattccctgaccccttgcgcttcccaggtgaggtgatgcctcaccttgcttcggctctcactcagtgggctgcacccactgtcctgcacccctgtccgacaagccccagtgagatgaacccagtacctaagttggaaatgcagaaatcaaccgtcttctgtgtcgctcaagctgggagctgtagactggagctgttcctattcagccatcttggaaccctcccccgtttaattttttatagtaagtgcctgggctagattgtcacagatcttgattgtgattccagagccagtaccttatcacagtactatgaagataggtaatcccatcctcatacacacacgtgctacatcacatggcccacgtatggtgattgctgcagttcaggtttctctggaaccaggctctgagatgaagatctgcaggcaggatttttactggtgagggctcctgagcacaaccccaaggggagtgcacaaaacaggacaagggagtcagagaagttgggccgtggtgctgtcacaacaaaagcctcagccaacctttcaggtcctacacattgtcctgaactgagtcaagagcctttgtgttcccaagtcgaccactcattgaatgcacatgggcctggggcaaacagtataatcttgggtgaggcagctctgattagctgaaggcagaggacaatccccaaaaggaaggacctaagtgagccatcagctgtcaacactccaagaagctggagaaagagtgcttcagtcaggaaagggcaggggatctgagtggcacatcacagctctaccacagtgactgtgtcttctgatccccaactcaggatgcggccctgtgaacctgtttatggattctgagttacagattatatcattttaaggccaaataagtcaaagaaatcagactgaggggagaaaagaacttcaaatactgctttggtttatgtgtagggcaagaggagtatttctctctcctcttagtctctctctttgcctctttctgtctttgtctctgcctctgtctttctcatttacattctctgtgatacacacatactaatatgatgacactaaataaaacatgaaacccctgatagcaaggaggggaaacagaaaaggagagacaataatttgaaatactggtaatggatagttattatccaggtggatattgggattttggaataattctatcaataatgtacatgtcctctaaatgaaggacatttatgttatgttgggtgaatagaaccctgttagtagttctgcatcctcaatcttttttttatcctcaatctttcctcataggtcttatatattaaaagatataattgcctcaggatggttcttgcctaaaacaaatagcaaagatacttatactactgattgtgaagaggaagttgttttatttttccattttaaaataagaacaataaacatgtttttaaagtttaagatcaaaattatttattatttaatgttatctacttatccattatgcagatgcttttaaaaagctagaaagtcaacaactggcaagaatggttttattagggcatgaattagaaataaatccccaagggaaaatgaattcagcttatattatgagaaaatgtgaagagtcattaatccatattatgctgccttgctattctattaactaaggcaaaaacaaattctctagtcaccattctcattttcatgagtagcaaggtattagtgcagtagctagggttcaaaagttaataataaacctgaatcaagaataatttcaaaagtacccagacaacaaaaggcagtggagagtgaaaattcaaatgtagcaggacattatctgattagaaatctgttgtcattgtcctccaccaaaatggcccacgaattgctgaggtaaagtctgcgatctctatgatgggattgaatttgtacccaaagttagtagctcagcatttcctttcctctttctttttaaaaccccacattataaaagggcacacagcaacacattttactgttaaatatgatctgagcctgttggaatactgcccatgcaaaagtgtcaccctggcaactcacccatgccttccacttcccaataggagttttcccatacaaccctccccttgtagaatgctgttctctaaccacagggtacaaggaaggcagtctccagtgctgttccaaactctgaatacttctaagtggcaactccaaaactaacataaattgcatgcattgctttgcttgcacaatgacactcactttggaatccaagcagaaagcagccacctaatatggttgcattctgtcctttacccatggtaagatagttcagaagaagaccaccaccaagtcaggtaacagtggtgaaagctgacctcccctttcgcagccatcataccatcttgtgttcacagtctgcaatagtttccatatctattcatccctgctcatacggttgttctgcccaatgcagccaagcgatacacacggcaaacacttagcaaatgccaatgtctccccacagcactcaccccttatccacaacatgctatttccactaccagttccacaaaccaagggtctcacgttttagagacatcatattagtgtgtgtctatcatgcagcgaatatgagtgagacagaaaaagattcatagagacagagagaaaatagaggcaaaaaagattgaaacagggagaaatattctttgtgttctgcgcataaatgagtagaaacttttgttactggcagctttcgggatgagtgaatcatgttttgtacacgcactctgataatttacagcccactggtttcacagtaaagactgaccattctgtggacttcagagaacaattcattgtcttcaagaccacctacaactcgcgtgtatgtgccgtcattccaaattatactaatgcagcgtttccataaattcatcctctacacataaaactcacagtagattgcaatgtaattgaccaaatcagaaatatcttgtgctttctggatgactgtaattaaccacaatttattgtatatttcaaaatagctagaagaaagatttctaatgttcccaacacaaagaaatcataaatgtttgaggtgatggatatacccaattaatctggtttaatcattacacagtgtatgcatgtatcaaagatcacctgtaaatatgactaatttgtatatgaaatatgtataatcattatgtatgaatttaaaaatgaacaaaaaaggtaatatcctgtgcctaaaagtgttggttttaaagtcactgatgtcttttttaactagaatttaaacacaggtggtttgattctgttccaatctttcatttcactggtaaaaccagtctagagaaataaaggctgccaaaaacaaaatctatgttaaaaattaaaaactataaaatttaaaaataacaaagccttaatcagagcctcaagtattaaaagagaatctgattgttgcatctagattgattaaccaaagcaagtgtcattggtgtgaactgatttacttaattcaattccctattttaagacatatagataactttacagctcaataaagatttagaataagagaaaaaaaagatgaggtggaaacggcagagtgagattcaggagaccaggactctggttccagctgttagtgttcagtaagttacttaattttgcctcaaattatttttcttgtgtatgaaaaagtgacagattcgtggacctttaaagttcctgaaaagatggtagtgaactacagagagtaaaaatcgagcattttgtagctttccaatgggtattaaggaaaaaaatcagtaagctaattaagatcacagtaatcaaataaaattcactcaaaatagtactattgtaagtattatttgaagttgaaatttttaccccagacattccctcaaagaaggctgtgagaatgaatttcagcagtctgacttgggtggacttgctctcaaacagtgcaggctctgttataacaggcctcaaccatgtcctgggtggatgctgagaagacccaaagggaggggccctaacaccaccccactgaagaatgcaagaaagaccctctcagtctcccataagcaatgctgaaacactgggcagagcaatgaaagtgagaatttgacaaaaaatcatgattgatactgaaaaagaatgacatttgagaaagcaaagctcctttcgtaaataattgctgtagctattgtgaattaaaatggagaatagcactggcttgttactgtccttaacttcagggttcacactgtttgttaaagactgctttgaatttccttttatcaaactggaaaggtcaccgtatttgtctctaggaagaaaaatcctaatttattatgccaagaaaataagaagaaatactacagatacaaatgaaacagcagataatgtcagaataaaatgaaaatagagaatgtggtaagttgtgctttcagtaaataaatgaataatattgaaggcttaaatacaaaatcaaatacataattaagaaaatatttttaaccattgcctataactcccaagtgaatgtttctagttctgaatcttccccttacctccacacttacacttccagctgtctgatggatatttctatctagatgtcccttatatacttcaaagtccttcctttcccaagaataaatctgcttctctcctaaattccccttctggcatcataatgttctcagtcacccacatcagaaatccaagaatcccaagtcctgacattttcctacttcccatgcccaatcaaccaccaaatccagctctttcaaattcccctttctttctctattcgatgctgcttctagccaaattctaattctcctcgctctcccccatataattacaaaatgcatctttccctccttcaatattgctctagttcattctctatacttcctccagtgtaatacacataaaatgccaatgacttccagctgataacacctcagtgcttcctgctcaccttcctttcacacatatgccataacttcttactttctcacatggatttcacacccctatcccactgctcctacctgcaatgcccttgtccaccctaccctgctctttacctaactcctattccactttcaggagccattttaggggacacctcctctaggaagcctgcttttacacacagccctctggccccagactgcattagctgccttttccattccttaatgcaccctcaatatacttttatcatatagaagttggtcatatctatttatgtgcctgtctcttgcatttggcagatattccttgaaggcaaggacttatcacctttgcttcttgagagcctagcaatgtttactgaactgaactgaaaataaatgaaactatggggaaaaatatattggtgggtatgagagtatttctgaggattataaatgtttagaaaagtagaaattgtttttcttacttatgcaaataatacctcatggtttacaaagtgttttcataaaagttatatcgtttgatccttaaaacaacccaagaaggtagggtaaggcagatattgaggctgatagagaccctaaatacataagaaatttctccaaaaagagaaacattattgatttttaaaaggggtgtgtgtgtttgtgtgtgtgtgtgtgtatgttcagatagatcttcataagatcagagctccaacttcaaataaagttcctgtttggtcaaaatagccaattggtttcctccatatttactaaaaagttttcccaaaaaagagaaactatcaattgtttataaaaaattttcaataacctgtttccctcttttcactactttccaagtagattttggaagacagaccagttaattcagtcttgtaaagacaaagagagaactaattcactctcaccttcagaaggtccactgggctagacacctcccaaatgtttttctgatttctgaagctatccttttctcaggagaatgccaacagctaagaccagcttttgtcgaagtcttcagcaaacaggggataaagaatgctgagagagaatgtcacaaagattcctgaaaaagaaaaaaagtaacacaggacaatgtaaattgttttgggttaattctatttagctgagatttcatcctactatcgtacgaaaaattgacaagggggacttactatatatcaaattccatgattaattttaaccaagcattattgtacttaatgacatcaatgtctaagaaattttaagcaacttaataggaacaggtaatgaaaataggtaacataattccaattacattgcagtgtaggacagaagtctgaattacccctaaatagcaggaaacaactgtgcacacaaatcaaaaagaaaaaaaaggcacttgatcttattctactctgatgcttcatgggaatacaccgtgctctataatcacatcaacaacaggccgtggcggggaagaatctaatacagactgaaaagaacaaacaatgaagaactaagtatttgatcaaggttgacaatgtcagagaggaactcagcaatgcaattagtattttagaggtggctttgaaggcggtaagaaaatatggcatctggaataaaggggttgctgaacacaccattataagaaagaaaaagcataaggttaaagtggaacagaataaaaccttaattaaacagaagccaactaacaggtgtgcttgaatattatgtttattacatatctcacttttatgagagagggtaaaaccacaaaaggaatgcttcaaaaagcttcttttaaaccagaacttagggtcagtctgtagtaagaagagcagaaaccacgagttctagacctgcctccaccactaacagtatggccttgggcttgctaagtgcttctcaaccctgcctgtgcattagcaccactgggtaagcttttaaaaagtatcgatggctgggccacatccagaccaaataaatccctgaccaattcaatcagaatctcaggtggaatggcacgcaactgtcaatattttgcaaaagaaagtcagggaagatattctttgatgacccctctagctctaacattctgtcttttctacacttttggcacctgacaactcatttgttttaaaatagataaaatttaaattgatagtatccaaaactttagaaccctataaatagttcccattttcaggaggcgggaactcagagtcaagaggtacagtgacttacacaaggtccaagcaaagcagcagcgtgagaatggggtcaggtcttctagggaggagaaagccagatggatcatgacctggggccagacacaactctgtttcaggatgggctgggtatgatccaaagacatgagccacactgatgactaggaagtgatgaggctcgtggctctctgggcagggatgcataaacacagggttcctgctttttaaggaactacaggccaggtccagtggctcacgcctgtaatcccagcactttgggaggcccaggtgggcagatcacctgaggtcaggaattcgagacaagcctgatcaacatggtgaaaccccgtctctactaaaaaatacaaaaacgcctgtaatcccagctactcgggaggctgaggcatgagaatcacttgaaggcaggaggcagaggatttagtaagccgagatggcgccactgcaccagcctgggcgacagagcaagactccatctcaaaaacaaaggaacaatagcaggcagggcacagtggctcacacctgtaatcccaccactttaggaggctgaggcaggtggatcacttgagcccaggagttccagactagtcttggcaacatgaagaaactgtctctacaaacaaacaaaaaaaattatctgggtgtggtggtgcgcacctgtggtccccgctactccagaggctgaggtgagaggatagtttgagccagtgaggaggaggctgcagtgagccaagatcatgccactgcactgcagcctgggcaacagaggaagatcctgtctcaaaaacaaaaacaacagaaaatagtaatcttagtagctaaactactgagcaccttctatgagctagacactgtgccaagaagtgctttcgttctcacaagaactctctgacctaggtactattatcattgccaatgtatcaatgagggaactgaagccaagagagatgagtcttgtctcaaaaatgatggacctcgaattttagaattttaacaaagctactctctctcccgaccatgcgttgcctcaaagaaatacaactcccttgcaggctggaggcaaggctgctctgccctgatatctactttatcttttttgtctcaatgcatcctcacactggaaagtggaaacagaagcctcctggagtctccatggtgtggtgctttcagattttctcaggctaaacaattaaatttctgttgagagagaattaacattttatggaataacttttattcttacacacacacttccaaattagtacactttggatgctgagatttaactgttttggagaagttcagctcaggcagccatcagaagagtcatcactgaaaactgccctaaataactcagtccatcatgatatctgagtttaaatgcccaactgaaatctctggaacatcattcacaattcatgggtaaacaattttcctaacattcttacattcatcttcaatcctcttaagagaagtatccatgtcgcagtttgctgtcccattacatttacattgggtaaattatttcttttatttgtacagcattgttatttactataataaaatctaatttacaaatatgttgcatatgaaatatattttaagaggctaatgcaaaagcattactgtttctgacaccttaggcatatcctaattatactgtgtcagaattatcttcatagctcattttaataataatgtgaaaagatggttttcattagacacatctgggaagaaacagaagagtggtattaaaaataaaaacacaattttgggagacagaaggagcctggaaggtcactaaatccaaccatctatctgcctgtggcccattctatttttaggaaattctatatgaagctgaatctctcttcctgtagctttgacttattgctcacaattctggccattggagccacacccaggttcatattctaatgttaacttccccaaccacagcccactgttcagaaaaacaaggataagctattgttttggtagaggtgctgcttggatcaggagtgagcaccttagaggctggtggatgacccaggaggtaggtttgtgcagagatacgctagaacaaagacaatagtaagacaaattgatcaaaccagctctttctgggatttagttgatgttgggagtcagaggagaacctactaaatatgcagagatagcagaaagaccatacgagagagcatgtgaaaggtgtcagtcccttgagtcatctcaaaccgaactttctactttacagatccaaacagggcagctgtgcagcaagcccctcctccttagagtgtcttgagtgagttgctgttttctttggcccagagtgcccaaattcatacagactaagattacagcactccatttactgccattcttacagctacatttcagactgacagttaatatttctctaatctttttgtaggtctttttgttagaaacaagtgaagcctttattttcacaacatcaatatttcaccttcttagattgggtccattatcccaacctgctaaaaacttttgacttcccaatcttgtccttacgaaatattcattatgccatcatctatgagttagacaagaacactatctagcaaaatattaatgctactaataaaaaatttaaaagccagcaacaataccaaattggacacaattttagagagcaaacagtagtataaaaatttgaaaatcaaattgttagtaaataaatttattttagtgtatgtcattacttaaaattaataattaccaatactctaagttgattgccaattatcctgaaaatataataagctacataaacggacatgaccaagcaattcatttgctggataaaggttttaacatttactcgttagagactgcaaaacccagaagaatgaggtttcggcatcattagagaaaatgaggccatagttgagataattggtaacatgaactttgtagctggagtaattacctgtgcagtcaaccaagaagttatgtttgagaaacatattgcaaaaacagagccaagttagcttcaaccttccctgaggcaatcatggaaattagcagaatctgtcattttaggtcatcggtatccccttgccaaagtgaaattgttctctgaagaagatctcaactgcttttgtctaatttagttctcagtcagcctcacgggatctctccttatggtaaaaagtctcacaccgaagggctttttaagttctcctggctgcttttcttagtttttctgactccaccattatagtcaggtgccacttctcaggtggtcagtatgcctgcccagagcaatttaacccagcctcactccactaattggatatgcctggtcctctccaggctgactctgggtaaagtaaaagtgaagtgcctcagagggagagcccgatgcacgagcctattaaaaaagcacgagtgaatgtgtgaatttcacgccatctctgatgaccattgagaggcctttctggcttgcttccttctcagttgtgctgaatgggtaaacttttccttcaacaactggtgttgtagacccattaggtgccacaagaaatgcaaagactctaagacttggcagctcctgctcaagaacagagataggagataataccaatttatgttctatggcattttgaggcttatttttcatagaggtaatctcatttaatactgaaaacgtcgtttttctagcattttacagatttaaaaagtaagtttcaataaggaacttctcaatggctcatcatagctagtaggtggcaaaaccaagactacaagtattttgtaattcttagtccacatccactgacccatatgcaggcaaaatgaccacatagcaatatgttgagtgcttactccatcctaaataccgttaaaactggttagcatatatttgatcctcatgacaacttaatgaggtatgcaatttcaatatccccatctaatagatgagaaaactgaggcacagaaagaggactaatggtccaaggttgtacagctagttgggggcagaaagtgataaacacaatgagagccctgccacccgaatgtggaggaagttgttggatttgttgctaggaagaacgctaagcaagttttggaacgttttctggcatttccagaacagtgagacttttcttctcttggaaatcttgtgaggagacattggcatcagagatgagaaaaagatggcaattccaagaaaagaaggaaatgtgattttttcctcgtcccctccgctatgactatggatgtgtgagtgacttagcagcacagagagctagcggcatatgaataccatctgctgctttaatacttgctatgtatattttctgtcatttcaaattctttggacagatcacactggttgagtaaagcagagagaagagactgttggcattcatgaccttacatttgtggtttgtgatttgacagtggacacccaggaagtttattaagtgtagtgatttagcaatatgctggaataccagtttgcatcgtacaaactcactggctactgggcattcacgcctcagtgcggcttctttgttctgaacatgttttcgggtatgaaaaaggcaggagccaggaagaaaggaagtgctccagctttcagtgagtagttttcatggtccatacttgggactcagggcttgcaaacacctctttgaaccctcacaataatcccataaggtggacattattgcaacaatttcatacgtggacatattaaggcacagagaagtctagtgacagaccccaaagtcagagagcttgtccatgtcagagatggcatttgaacccaggtctttctgaccctgttgtggcatggcctcttccatttctgctcaaagagttaagcaaacacacaaacaaaaactttgcaaagaggagggaaagccactagatgacattacgttttagttaaagttagaaaagcagtatctttagatatgtttgatatgtggaaaaaacacaggacatttagtggaaattagttccaggaaaaagccagcagcctctacaaaccttttcatatttttgaattaagaggtaccttaggtcgggtgcagtggctcacggctgtaatcccagcactctggaaggccaaggtgggaggactgcttgggcccagaagttcaagaccagcctgggcaacatagtgagaatgcctctacaatttttttttttttttaatttaaaaagagatactttacagtctaagaagccagtccccaagggactgctgtgttcccaggaattcagaagtggaaggagaaatgcatcaaagataggactattcctggcctagcacaggggtaagggtgtgaccatggtaaatactgtgaacaacaaataaagggcttaggtggtccaaaggagacagaaaatacttctggctggaatcaggcagtaaataatgacctcattgagacactggcaggaaaaaaaggggagaaatagaatgataactttagggaaaagcaagatgagaagtgattttaggccagaggagatttgagcacatctgtaggctgacatgtaataagaacagacaaagaaagcgagtgaagctgcaagttggcaagagtaaacagagccaaggcctcatgtaaagggttgggaataggatatacagggattagggagtttctactatacttcagccacattttgtgcacatcataaaaatttaatctacttcaaatggtaagggatacagagactcatttcatgtctccttccatgttggagagaacactcctcagattgaagcttttctgaaatggccaaaaactattacaacagcccatatgcagcaacctgcttatttgcatattgcccagtcttcttactggaaaacagctggagtcagtcaaaatgaaatgaaatgccagcacacttcaacagtaatacaaatgccatgcaaccttgaacttgagtttaatagaataaacaaaacaatttgctttgatgactctgaaaagcaactgaacttgttccaacttgagcaggagtttgtttattttgcttagctccagtcatttattcaaatcactcaagaaacatttagtgagagcctactgggtaatgcatactagtatgaagctagaatgctaatgattttcatattcttccttcatttctactggattattttagatagggtttcatttttaggtggggaatttctgcagctgatgtttaataatatttattctttcttatcaaaaaattgttttcattttccaaaatataaaaagtaaagaaaaatttttaaaagaaatttaaacattttcttccatgttcatgttttggtgtatgttttccaagtcttttatttttcttgtgtgtctgtattcacttttttcagaatagaagtggtatcattcagcacacactggtttatcaacctgctattctcacttaaccatacaccatgaacatttccccaactcattaaatattctataaaatcatttttagtgtctgaatgatattctaccatataaagaaaccatatctatttaatcgctgccctaatattggatattaatgttattccaactggctgactttttatatgatttttttaaaggtgcgctattttactagcactggctgaaaaaccaccagtaagattgttatatggaatctgatatatggagcattattcaactgtgaagttccatttctctcatctaagattgtgatcaactgaaccgagagtatttcaggccaagtacctgctcagagcacagccagcccaaatgcccacttatttctcaccttctcccatcacagccctgccctcaccatttgctgtagatctgtagtttgacagtgagcagtctgcctgattggaagggaagaacagctagaagttatgtgcttacccagctcatgattttgaggctgtattgcagtagttctcagctctgctggacttgggaatcacctgagctggttttaaaaccacaggcgatatgtttactatcttgattgtgttgatggtttcacaggtgtatgttaaaatttatcaaattgtccattttaagtatgtgcagtttgttgtgtttaattatatctcaataaagctgttaaaaaagcaaaactccagatggccaaagcccacaattgagattccgatttaattggtcttgggtaggactctccaggtggttgtaatgtgaagccaagaactattaatctaatatataatgaatctttccaaatttaaattgatgtgattgatataaaattgataagggaatatttttaaagaagtgattttatcattttcaactacaaacaataacagatttgttttctttttttaaaaaaactgccacccagcaaagaaatttagagacttcctttaatgattcataataattcataaatccaacctttaattgcctatcgtgtactaggtactatgctaggtagcacatagattatatgcttgtatggaactgacactttttaagagcccaacattctcttaaatgaatttaaactagattaaatccacaaactggttaaatattgatttgtctaggaagaactaaacggagaaaatgtaaaaatgaacctgttgtggccctatttggtggtcatggattctctatgagtgccattcaaatccaggaggttttgctctatttgccaagctgctgagctgggcacaggctttttagcaagaatgtgagaaaagctgtcccggaaaattggaagcttcctgccagagggcaccatcctcccctcctgacatatgaggttctatgccagtgtcttcacatacagataccaagacagcttcatatccacaataaaatagccaaagcctcttattagggaaaattgatatttaatattagctcacatatgtctttactccgttactaatatgaaactttgaacataattagtgttggctttgaatgcagtttggaactgcacccagctggaaaggggccatggagcattgggtttcattcctcaccaagctgagcactccctgaaagggattagaagagaaagaaatggagccgaccctcattcagtaagaaatgtcctccttgggttcagtgggatgactgtagaggcggggcgggtaggagaactgggactgtcaccctcctcaattccttgtcgcctcctacctccacaaggcattgcaaaatgaaattaggtgaatggagcccttaagctggggaacgaggggtgtgacatattcagggagctgtttgtgtgagggaaggcacaaaacacctgcctagaaagagaaggtggctgtggagtctcacacggccccagaggagtgagattcactttggtcacaggatggaggctaggcaggaatttgaggttaggtaggatcaacgcgtgcagagcattaagagaaatgtaacctgcaaaaaggtagaatttccagactgctgaccactatcactgcttcagctaaaacaaaacaacattgaatgttttttcctaaatagaaatggatgacatattttacatcctgcataggaaggaaagtaaagccatctggcaacttccaataaccagctcaatgcattgcacctcccactcctacgaacagtctgtgacagccacacttatactaaaatctaaagcttctgacacttccttcccaaacttccccatctgttctgacatctcctgttgacctctctccagagcctctttagatctctccctgggtcactcttcaattccattttcaccccggtgccatctcgcgcatcaccccagtctccaggcaccaggcctgaggacaggtcgctcctccttcattctgatgcccagctcaggggtccaagaccccattttgggggaggaggagcatgatggcttcccccatgttctaatggtttcaacagcatcttatatgtaacctgtaatagacccttattttagtagtgaaaaattaaaatttagcaaaatttcccctggcaaaaaaatttcacacccatagaagctgtgaacacaaggttatgtttaccttgttagataaaataatatgcatagacttttgaaggacatctagattctaacactatatcataatttgcagttctaacttctaaataaaaattgttttgcatattatatctttctttttaaaaggttgtatttgaatgattgatttcccactaaatcaagccaaatatgtgtctcacctttgacttattcctgccaccaccttgtttgtttttaaatcattacaaaaagaagaaccctgagccattaaaaactataggcatacccagcaaatagttcctgactcaagagactctcaaatcaatattcttaagttgtattttagtacaactgctgcaactgtgcggacctcgaattcaagtttaaaaacttcattaaagtacagatagaaaaatataagcccatattaaatagcccttgattaaatttgggtgtttccttataattctagtcactatgactgtatttcacccaatttcttattaagaattgtcttgttatagtggttgcagtatgcattgatactcatcccacaaacctttaaaacattacaagccatttcatagaaagactaggggataattttcttggacaaaagatgaaggtgaaatgtgagagtgctccttaaatttgatgggtttctgggagtacagtggttgccagtcctcactgtacatgaaactccctggggcactttcaaaaacagttctgatgcttgggccccaatcccagggatttaattggtctgaggtagggactgggccttgatcaatttttaaagctcaatctaatatgcgttagaggtaaaccttccctgaaggtagattttactttaatacagtactaagaactttgtaaggagaactgtccaaggacaaaacaggtcacctcgtgagggtcaagtcctttgtcacagcaagtgtggaagggcagcctgtatgactgagcccctatcagggatagtggaggaagtggtccagcatggggtggttcagacccttgaaactgattttttctatactagttctatcttgggtcagtatttaaggtaaagcaagcaaagaaaaacgccttgtttgctatgtcatccttgaaacaaaatagtttatataacatctttcgtatcatcccgataaaacttgttaatttgcacacaaaatcaagcacaaaattttgttccattttcagttttattctgtttttttaaaaaaactttccttctacaatgaattgattatattctaattgttgatactttttccaactttccactacttcagcctatgaaaggccttttttaatcagttggcatttattttttcttcaattcataaaaataattcctcatcccaaatgttctgtgaaatgttattaatataggactacctgtggatttctctccaattatctttttttttcttaagcactaacatgaaaatttcctctaacctttcctgggagatacattttggcttttatttaaaggatgatacccttaaggtttttttccttcaaatttaaatgcatgaatacttgcaggagctaacaggataaaaaggaaaaggtccctgaatgtctctatcattaggttgggatttttaaagttttgctttttgttgtttctctataactgggttgatgttaatactatatgctattttacaacttactttttaaatgttacaacatgtgttgagattgttccatatcagtagacatgggcctagatcttttctatttttataaaataaaaataaatacaataaaaagtaagtgagtgcaatggcgtgatctcagctcactgcaacctctgcctcctgggttcaagggattctcctgcctcagcctcttgagtagctgggattacaggtgtgcgccaccacgcccggctaattttttttgtatttttagtagagacggggtttcaccatgttggtcaggctggtctcgaactcccgacctcgtgatctgcccgcctcagccttccaaagtgctggtattacaggcataagccaccacacccagccaggcctagatcttctaacagctacacagtatggatgtaccttagtttcgtaaccattccactgttgacagtccactgttgataggtacttaagttgatccattttctttaaggaaacaaaactacagtaaacaatcttgtaaatatgtttatgtatacacagatcccccaaaatggaatttttggttcaatgattatttacaatttaaattttgataaaaaatatcaaattgacttccaaaaaggctattatgatttacacattcataaatgtataagaaaactgtttttctatcttattgccaacactatataccatcaattttcattattccaatctcaaaggcgaaaaaaaacaactgagtcttgccaaagtttagagtgtaagccaaagcatgagcaactttctagattgttgttaaattttacaaaaaaaaaaacccaaaaaacgatgaagctaaattatcacagcaaatgtctgaaatctacacccaaacctggcgttttgctcagattctaagactgtgtgagacctttgcagtaactccttcctcttttccccctcatagtcactttattgtatttttaatgttttatttttatggacaaaattgtatatatttataatgtacaacattatgttttgaaatatatatgcattgtggcatggctaaatcaagctaataaatatatgcattacctcacatatttatcatttttatggtaagaacacttaaaacccactcttagcacttttcaagaatacaatatgttaataactatagtcatcatgttttataacagatctcttgaatttattcctcctaacttgttttgtatcctttgaccaacatctcccaaacctccctccgttcccaccaccccagcccctggtaaccaccattctactctctacttctatgaaatcagctttttaaagattctacatgaaagtaagatcatgtggtatttgtctttctgtgcctggcttatttcactaaacataatgtcctccaggttcatccatgttgtcgtgaatgacaggatcttattctttttatggctatatagtattctattgtatatatagactgcattttctttatccattcatccatagataaacacttcggttgatccatgtcttggctattgtgaatagtgctgctatgaacacaggagttcagatactgatttcattttttttggacatatgcccagttggattgttggatcatatggtagttctatttttaattttctgaggagccacaatactactttccataattgctgtactactttacattctcaccaacagtgaacaagtgttctcttttctccacatccttgccaatacttcctacctttcatctttttgataatagtcattctaacaggtgtgaggtgatatctcactgtggttttaatttacatttccctgatgattagtatgttgagcactttttcatatatctgttgcccatttgtatgtcttcttctgaaaaatgtctattcaggtgctttgcccatttttttatttgggctgtcttcttgttattgagttgtttcagttccttatatattttggatattaaccatttatcaaatgtatggtttgccaatattttctcccattccaaataaccctttcctctttataaatccttaccactatagcctttgaaagacaactcaaaactcacctcctccaggaagccctccttgattaattaccttgatctcacacatttttattcttcctttactctgatccttcaacacttacatatttagtctaaattggcttttaggtttccctttgtatctcccaataagtacagtaagacaggaatatagggggcaattaaccaacagacatcaataaatatttatcaaacatttattatatttagttatccagccaatagaaattcatttggtgctgtattgagtccaatttttctgctttcccaggtttgcctgcccctctccacactgttcctctggctgcttgctcagtgtaaagtccctgccacagccaccatcttctctcccaacaccatcagctgtctcagcctctctgtagctgatggctctgactcagcctctgtcatgtccacactgcagcaggagctacacccctgcaccctcatcctgtgtagctgctattatagagactctggcttcttgaaccacttctacattccaacgaagcaccctgctgtggggtataggatctggctttcccagaggctgatcagagggtcatggtaacataatctgaaaacaggaacttaaaacttaatgcggaaaccttgaccagtaagagacaggagacaagaaggagctaaaagatcaattccttgccattccttcttgtgacagactgttgcaaagtacagtgtgatcccaaagacctgtctgcaagacagtgtgtgtcacagagcaaccagctgtatttccttgagaagctttggacagcttggcaaagcactgttaggtattatttgtctggcttcccccgttccctcactatttttgtcctggaattccatctcctcataaaaccttctcaagtgagctcagattctgttttctagggaacccaggctaagacaattatctacataaactctccactctacattagactagccctgagaaagggtacaaaagaggcataaaagaagtgaatcctgtccacaacaacctcacaatctaactggggaggccagactctacctatgtaacaataagtgaaaaagacaaaggaatgaatgaatgtaattagagggcaaattgttcagtgttttagaaaatgggagccatttgataccactcagtgtacagggcccagaataaaacaaaaagtattcacagagaagaggaaaaccatcagatctcacccacggcagactgctaggaagaggggcttaaaaaaacgctgggaagacagagaaggggggaagactgcagggagtgtgttccctggagaagagtcaccttggtgaagccagcacaaccacaacagtgggcgtggtaaggagaagcagggagagcctgaaggacattgggtttccctgaacagaggggcttgctggggagcagcagggtgagtccagggttcatagcagagggctgtggaggcaagacagaggggtttggaggtgaagggcatttgctactcctcatattaccacagaagagatgaaaaagaaaaaaaatactccatttcttaggaggttgcagtataatattcccagcttctcccacaccctccatcacacctgtgagccaacagcacaaggaatctgggggaagaaacaaggtcttcttggccctgagccttctggtttccctttcatatctgccatctgacaacaggggtacctttccttggcaggcctgcctgtgtgagcaacagcctgcggtgggaccttgagggtgacaatgtctaatggagaaggaggtacctggaagccctgtggccgcacgtctaatcacttccccagtcagcctgaactataatcaagctggcacttctccttcaatctggtttttgtgtcgtctttctcaaatggtgcaaacttgggagggaggacaggaacattatttaatgacttcctaaaacatcaaaagggggcttagatctgatgcaatgagaaatgggcatggcaggaaagaagcatgataaaaagagataataaatgcttcttgattaaatggttggcctacatcctaatttctacccataaaaaggagaagaaggccgggcgcagtggctcatgcctgtatcccagcactttgggaggccaaggtgggtggatcatctgaggtcaggagtttgagaccagcctggccaacatggcaaaaccctgcctctactaaaaatacaaaaaattagccgggcatggtggcaggcacctgtaatcccagctacttgggaggctgaggcaggacagtcactagaacacaggagatggaggttgcagtgagctgatatcacgccattgcgctccagcctgggcagcaagagcaaaactccctctcaaaaaacaaacaaaaaaacaaaaccaaaaaggagatgagagggctccgtggtttccacatggttgctcttatgtagttatttttaccctccagtgtttttcacagtggccctctctggctttatttctgtcatgaagttcccttttcctctgagagatgctgcaaacatttcagaaacatttcacttgcttcttccagtccagaagagtgattcttccatgacagaacgggccagctgctgatgtgagcccatccctccagatcagcatgactaagatattcatcttcatggagcaagaataactacaggagatttgaatgctgcatttgctttaaataaaactgcagatgcaattccaggagtaggatagagacagcagaaaaacagcacatttcttttatagtatcatagtgtctattttaatcagcatattacagatgttttgagacattctagcaaaattgacatggttgacaacgctagacagaactgcctcacgggggaaaagaggaaaagattaaaccacaggcgtgtggcaaaggaacctgctttgtcagaactatgctttgtcatcaccgctgagatcagagagctgtttctatggcagcaggcaacatgttctggccaggagacaatcatgtagggatttttaatttcatttgatgtctaattgcctactacttcgggaaagagacaaataattaaaaaaaaaaagtcttccttaactagacagactaatacccccaaggaaaaacttgggtttttatagtatgcttttcaagatttgaatttcatgtctgtatagttgaaggcatgggaccttctccaacaaggcagaatgaaaccagtaaaaaggaaaggaaactcagatgaaatttccatcactgcagagcagttcacacatcctgttaattactattgccattcataattaagggaggttcctcatggatcttactaacccttctatcaaacagcacctactcttgcaaaccattggaagaggttgtgctatttatgacaggtccctcccatttcagatccatgctgttcatttccctgagcaattaacggacattacaaacacatattctccagagagattcctagtttgggaacatcacttttcagatgttgctactgttgtcactgaccatttatttcaatgttttccatcttcccttaaagagtaagtgattgaatgtctcatgattctctgcttttgcaacataacacgcttccctccatttgatcaaataatactggtgcttctaaggatcctttaagctaatagccaacagtagcctattttaattgctatggagatgtcttagtttgtttgaagctgttataacagaaaacctgagactgggtaacttataaggacagaaatttattggctcacaattctggagtctgagaagtccagtatcaaggtgcagacatctggtgacgaccttgtagttgcgtcatcccatggcaaaaggcagaaggacaagagagagcaagagagacacagggaagggggccaaactcatccttttataataacaacaatcctacctataagggtggagccctcatggcctaatcatctctcaacagtcccacctcttcatactgttacaaaggcaattaaatttcaacgcgaattttggaggggacaaacatcctaaccctagcgaaagaaaacaaataattttctggtaactgaggtaaatattccagcaatttgattgggagttcatgtcataatgagctataattttttctttttaattcagatgtccagaactcaacttctaaatctctggacactaggcagatggctctttcttttcttttcttttctctgctcttctctttctttctttttcactctctttcttttttcttttgcaagttacagaggtgacactggtgttaatacctggttaaataccactcacggacagtcactcattgcccagctttccaatactatggcagcccttaagctgcaatgaattaacaatttgtacacaaagtgggcaacaattctcaatatcacaaaccaaactgcaaccttttagccatttagcactgaaagttgctatcactaacactgaaccaatgggatgcaccctgacttcagcagaagaataaaagcatggagctctggaaacccctctgctcttacatcatgcccacagaagcaacacctgtgacacgcagaccaagaaatgacttctaggtgaccaggagccgtgtggtcactcaattccttgagtcatggctaccacaggtctgcatttctgtggtcttccccacagttcaaggccagtgcaaaaggacttgctgacttgtatttctggagattctctccagaaattggtagagattctctcaccaaacaaaagatttctgtgcttctatgaagcacacaatatcaaagcatctattgagaagaaagacaagtccactcacagaataatatgcaggagggcatctccagggacaccaatcacggctaggatcttaggacaaatgttttcctgaagagcataataatagatgggacaaacgatgacattctgacttgaagtggtcagcaccacagcctgcctgtgaaagcagcattggcctgaccacacactggctgggaagggagaggtcttttatctggtatacatattatacacacacacacacacacacacacacacacacacacacacgcactgaaagttgctatcactaagtatatatatattcacccatgtgtgaacaattattgagcacgtaagcacttagaaaatacacaccatcctcattttcaagttataatgaaggcccatacttaacatgattgattaaaatggtttgatataatttcaacattttaatacaactgtgtggatttttttctggcttattttatagcataaacatttatttgaccatcagtgtataggcttttgaatatgacacaagtaacaagtctaataacatcatgccacataaatattctggggaaaaaaatctgctcaaaatttgaaaaatcgagtgtttcaggaatgactcttccctacccataacttccaaaaatatcccctagtccttctgatattgagaggcactaacaggatatatgtatacttaactagtttcacacacacacacaaaaaatcaccgtatgtccgctctggttagggcttatcgtatgtatttcctttcattgccatctgattcattgcttcatcttttctttaagtaaaaggagtgccctcatccccgtaactgttcttagaagataacgttagtcattgtattcctacaatatgcttctcatctggcagttaatttccccagagggtactgcagacgttttattttcagataatctccaattagcttcctctcttcgttaccctgaccagctcactttcataattttctcctatacatcctcctcctcttaacatatttcttacttcacagggaagaatatgatttatattgcttttcatttacctcacttctttcctgtttacctgcttgctacagattttgcattttaatatccaaaatccaacataaaataaagctgcatgtttcatcaaatgttgctcttcccatctgagctcactttgcattcagtccttttcttcatgagtttggcagtatatatagagtttgaggtatatattatatgtactcacaaacaggcatgcttaagccatacaaaagtgggagctcacccaggtgctctcatttcaaaggcacttcttttctctcagaaagttacatgtctccactttcgtgtccacacacaaaattcctttatccaagataaaaacttttaatgtcaaaactagagatatagtttaaagcagaacaggtaaataaataacttaaattttcactagtggatgaaagttggattctttcttgagaacaggttttgatgtcggggtgagggtgtccagtaggcattaagtctgtccaggtgcacctcagagaagggaaatgagtgtatgtaaaaaggagaaactgaggccactgaatacacttcacttggttttccattttatgtacaacacagtcatcttctagttatttggtagcaaaccaagaatttacaaatttaagtacttacaaatattttagttccatcgtgtgtgtgtgtgtgtgtgtgtgtgtgtgtgtttatttttaattttcaagtatttgaatctacaaaagaatatcctttcagaacatctgtacccagttaaggaatctgggaaagaaaacagaagtggactgaaatgtgttggtcttatctttgtctggcctctatgaatatcttgactgtcatcaaaaatatctctttagtagatattactatagagattctgcttttcagacacacacaaatccttgcagacacttgatgtctgatgagtgtctcttttatgcattttgacttctgagaaggtctctatccccaaacagtgagcactactttgctaaaaaaagtctgtgtgttctgaataaatggaaacgtcttaccaatatatgaattgctgatctttaaagtaaataaataggcgaatagattcttatccacatttcttctagccacaaattttaaggaaatcctgcagtcctttacaagggggggagtttctcagctagatggaaagatatgacgacaatttccccattcacaaaacatttcctgtctccgtaagtacccactgcccaattactcattttacacttattctgtgtgaatttacattgtgacttggcatttttaggcatccgtggttcctactgatttcctctggtccccattggtttcctttcttaggctttactgaatctcccaagggccaaagtagaaacccaattaatgcgtgcataacctagatggctcatgcccttacttttacattctttccattgcatgacactgtcttggagctctttaaggaagcatctttcaaaatcttgtgtgtgagagagagaaaagactcacagaaggaaatgtagaatgggaagaaactattcatgaggaatatctctttaatatagtaagagcatgttggtagaaaaataaagactgcttgataactaaaggttaataaaaaccacaactgttggaaagcaaagacataacttcattcccccacataccccaaaatagcatacacagaaaagcaactctacatagccagttaagaaggattaattatgcctctaccatgagctcaacattatggtaggtgcttagcgaaaaaaagactataagtgtagatgtatatatgtgtgtgtataaaacgtgtaaaacaatataaaagaataatatcttatgttagatggagtggaataggctgaaagcattaggagagaaattagtgtgagccggatattagtatattttagctaatttgcaaaaactcatctttgactagtcatgctaaagtattgcctataatatcacatgccatttatcaatgtttacatgtctcatgatcatatattcaaatgttgataattattcaataatatagaccattgcaagactaagtcacccccaatgagaaatgtaattcaaacctgtaaacctactgaaaatggactgaaataaagaatgtgaatgcattttgtagaaggaaaagtattattcatgaagtagatattagaatcattattactattgtcatctttctcataagattacttgaagaaaaaaaagtacaaagttaaaatacaaaatgatgtcaattctgtttattaaataaaagaggcaggtattgttttccctgtattccagataaggaactgaagctattcaatctacaacttaagaaaaatcaattgggtagcaaccactgacagagtaaatcattttgttcttcaatcatcttgtatttctgaccaaactgcacagtttattttgagaactctgtggttttagtttaggattttaggagtctagagagacttctgacctgccctgtggagattaacgacatacttaattctgtttgtctaacagcaggcaaaagatctgactagcagaatggcagcaaccttttccactaaaacgaaggtatgtttatggcatgccacatacagtggaacagtagtcaaaatagtcaaaacaggtctattggaagtggggattccaacctcctccacagcaaaatacatttcattgataacacctcctccaagagccacttcacgagttcttaggtcagagtatgctcctcccttctgtctctcttctctaagctgcaataccagtcacacagccttcaagctctatgttccattctacaataaatgtttcaaataaattccaacatgacttaatgttctaagcttaaaatgccatgttatagtagctaacatttatttagtgctatatgccaggcagtgcagtaaacactttacatggattatcttatttcatcaactgttttgggaggtgggactattattaccccattttcacacattaaaaaaacaatgccaaagaaactaaaaatcttgctgaaggtcacccagctaagtcacttactgaatactcacttactgtatccctttggcccaagctcttttatgtatatgaaatctttcaaacaaactgagacgcagagtgtgtaatataaaatacatcacccaactttgacaagtacacttaaagtaaaagatacaggtcatcctttacataaagatacattttaaagtataatggggtttctcaatcaaaaagaaaagggcaataggaagctgaggactgaagtgaatctacacccccataaagaaagtcctactaagaacagtgccaggcattgagaaggtgcttaataaaatttcactgaacatgtaacaatattttcctttctaaatatataaaagaggccagagaagataatctgaataaaaacatgatggtccaatgaggagcaattcagccacgttctgtagtgaaagagttaccctttcccacctgccctgactcccaccttccctggctgcagtagggtggtcctctcatttcagccccccatcttagcctccaggagccaagagaaggggccactgcacaggctgagtgcaggggaaagcatcctgcctcctgcccagggaaacctaggcaggatgtgaaatagagttaaagacagtggttacctctggagagaagggagggggatatagttgaggatgggacttgagagctattggtgactttctgcatcttcagcttggtagagaggacggtgattctcattatgtccctctttatctttttgcatatatggaataatgaaatatgtacataatacaaagatcagaggtagctgaggggagaaaggatagtgagtcaggaaaggaagtaaatgaaagcataagaaagatgaaaagtaagaaggaagggaaagtgaaggagaaagagtcaggtggattgggtagtaagggaagactgaggcaagaacacagccttcagcaaggatctcttaacaaaagtggggatgggggtggaaatcacctgattcagagagaaaaggaagaggcacacataaaatgagaaaatcatgagtgaatgacgagataaaaataaaaggtaacttcaaatatgactatgtgctttgagcttgctttaaaagagaacttcagcagtgggaacagaaaaggtttgactgatgaggtaagttccaaaatacaaaaccaagaagcacctcagtcgttgcataagtctatattccagctaacaaagatacatgttaatactttaagctctgaacttcatttttggtggcaatcatgctaaaacatattacacttcatgaccttcttaaacagaatctgacctgttctctaccactcggtgtcatcaccaagaacctgggtgataacactcagaggctattgcttgctgtggcagggctagggcccccacctcccaggctagaaacacctagctacagggaagccacataattgacatatgctgacgtcagagtgttgaaatcctttttctggaagttgatcttaaagtttggccccaatgaacatagggacaaatcccacatctaaatctgttaataccactgtcatcccctcttctccatgtgcttctccctctcttccaaaaggaaagcacatattccaaatgtgccccagggcagttgttctgatgatcaatcacactcacctctttgagcccaccgaccttggattatgcactcacatgaaagaaaagaaaccatatcccttcacagccagaaatcttcaggccccaatgtagcccagtgctgactgaccagttagagcttatcaggtttcctaccaggagtggggcatcgaagagagctggtgagaagggagtgagctagaaactgccccctcagtcccatgtagtcttcctggtgaaataactgagaaggtagccattctgttcagtaagaaagatgaggtgctggaaaaactgcctgtgcggtggcttcctggaagctctggagaagggaagtcggtcagaggtgtggctagtgtctcaaactgataattacagtgcatcaactaatcatttgaataaagggatgtgttgcctatcaggcaagaaagcaaagacatgtggaagcagaaaggggcactttacacaaaatgttaaaacacatcattttcagacttcgtagtttttgtcagtggggtttacactattgctcttgatttttaaaactgaatgtaggttagtcctatctacacctggagtgcaatgcttctcaaaggcgcctgagtgaatagtcatttcagtgaaattgaataatatattctatcatgaaaatatcaggggggaaagaatgtactggaaactgacctgtctttaaaacatgtataattattaaatcccaaatctgcatgttatttttgagcagcaatatgactatagctctatgagtccaatgtctaatagaatatatatgaaatatacattacattagtgtattcattttgtttcatctgcagcctttctcaagcaggattccacttacttctgaaagaattaagctctggagaaaattatttgcatgattattttctcaattctctcaaggatggtacatagctagtgcatagataagaagttaattcattacattcaattagtgccttaggacattagagttcagtaaagtcttcccccaacccctcgatttcatggaaattttttgcaagcatgtgcacatgagcaattttctggggtgagatgtcatggctttcatcagattttttaaaagattatgacccaaaaggttaagaaccactttgctagaatattagtaagattataagaaaatatgatggtaatggaagagaataactcagaagaaatggaacattaaaagacaaagttttattttcccaacttttatttcatagatatttccaaattcattttgattattttctcccaatatacatggagactgacacccctgcacaatactaaatcccaaagatttatctcctatgactctgcaaagtgggaatctggccccagaagagatgatacatgtgcagtattttaaatcagtgggttttatatgtggtgatttgggaaggctttcaggttcaaaatcatagtgtgtccattttcctcacaatctattatgagtctgtcaagatacagaaatatatcccaacaattttgctgcctcaaataattatccctgactttatagttcttacatatatttaaacatactttcatccaccgaacagatccaaattcaaggttataaattaaattacaaaatagcaacgacctaaacacaaaaaaactatcatattgacctgtctggctctagagatgatattggcaaactatgtgttgttattattatcatgacagattaactgttgacactgtacattgtctaggtgcgtcctgaacagaaatggctggagagttcatggttcacacatcagacagaagtccaattactaaggaaagcctcagagacttcctctcaagagggctctgctttctctcattgccactattgctcctggctttctttcgagtctagagcaactggcctaaactgctgttttatttatgagaaaggaatttttttaatgtatatcatacaaagatgacactaatgcattcatcatttttaaaaagagattcagattttcaagagagtacagtgaatgactccaggcatgcctgaagcaggtctgattatgtctgtgtgactaagaaaatagctacatctctgtcatcagaactacacatgaagcagaatgtggttatgtgtctaattttatgttcattttatgagctgcagctacacaactctttcacatattatagtctcttataaatgtatatgcacccctctcccctaaaactctagatgttacatggggacaataaaacataccttcttcattactgtgctctaggcacaaggcttaaacagagtgagcacttgatacttcccctttattttaattgtccaaaataactggttaaccaaatgcctttatagttcataaagcattcaaatgcctaatgcccatagggaaatccattttactctgaccagatgaagtctgcaccatttttctttctctgagcagaagcctcattcagggtaaggctgaagcccaccccccttataaaacaagaaggtctaagatgggggtgaaaaaccagctacattgatcagagaaggccctgacttcttttccccatcagcagattaagaccacctgtcatttggcctgaacaaagggcacacaagcacattttattaagcaagcaaaacatgtaattatctccacaacacaaaataaatactttggtattatttgttgtttttcaaatatctgtaaaaccagacttcaaaagccataaatattgagggaagtgggtcggcaacaatgtgtaaaacactgtgggatgttcagatgatacatgcatcctgcttacagctggcagtttactattccttgaacaacgctttcatcatcttagttattgaatcaaagtctgttattgctccccattgtgcagtggggtaccaacttttgactaaggaagtttattacaatttgatccactttattcatccaatctacttctccatattccaacaccgaagctctgctctactcaagccagagttacttactgtttcacgaacatgcctttcctctagaatgcccactctctaggctcctcactccaaatcctagggcacctgaaggcccatctccattcctttttcttctaggaaggcttcttcacccttgcaacctccagggattacttccttccccaaagacccagggcatgcatagtctcttctccaaaacctagggcttaattaatgaacaatacaggcagatagaattatttctggtgtgctagtcctcactcaactccatgagttcctagaaagcgaacactccctgtgcctccgacaaggctgttaaagtaagttactttacaagtgtgcctggcacattacaggtgtttcataaatatttattgaatttagttattgttcggcccaatatttcaacttaaagtcaagttttttgagacattgatttgttcttcagtacaatttattctctccaatggctggagagacacttttatgaagattaacaattacaagtaccaccaattttaccttgaagaaaaagaatttatttatgattttaccatgctcacttcactaaaaatagctaaactctaccatattctctgcttatatataaatacttcaaaaaagagatcagaaccttgaaatcctttactcaaaagcaagagataaccattaatacaaaaatcttgccaattctttgtctagaaattattggctggcaaacaaaagtgattgttttaaaagtaaacagcaaatccaagaaactccaccaaatacagttatttcaatcttgctcttgattcattgtccttaactattttactaccatatcttattttatttgagtgattaatcatcaatcaaatttcaaggctcccctgtggcctcataacctgccaattaggaaaatgaaatatctctgttgccagagcttagatccatgaccttctaaagtatgtataataaaaaggggtcatgggtcattaatgacaaatgggctttgtgatggatgactaaaaccagagaaaggacaagataaagcaaaaggagaaacgttttagaacttcataaaaatagaaatgatataaaaatctagaaatatcttcaatgacattagtcacaacaccatgctatttattatattatacatataaaaaccattcataggttttctacacactgttgagaaaagaaaaggtggcctttatttttcgctaaaaataaaaaacagctagcatggtgaaaaaaattaattacatagcctgtatcagttgtgcctacatatattagtgaaagtatacaggtgttggcatttttgccctgttttttcttccatgatacatattttaacattctaatgaagaggaaaagcatggagaccaacctgctgccccaaggagtagagagcgagggctctgcacaagtgacctttcagcttgtgagaagactatatgttcctgtgaataaactcacagaggctgcaaaccaaacaatgctgagatccttggacaaaaggaaggcagaggaggagaaagggcaagagaaattgacaggcctaacagagaagggtcccttctgtgggcaaatctgtaatacacaaaaaataaaagcttttacagaaattgtccttggtatcaatgtaactagctttatgaagttcaataagtatgtttaataaaagatggggctccatttctttcagattttgaaatttttcatactttttctttttctcccatcttacttcgtttgcacttattttcagttcctgtttggttggcagaagagtggagacattaattgattggagggcaaaatccacaatacttggtaaagacaagaaaaaaagtttttggaattttgacatgccattgtgacctaaaattttcttttcttttcttctttttttttttaaaggcttccaaggattgtcaagggtcccatttctccagaccataaagaggaaactcagtaatcccgcacaagcactgttttgttcagagggcatggtgaaatatacattatgttctatatatgtccttaattgacaacatttaatttttaaaaatttaaattgcaaaacaataccaacagtcaatgtgaaggaatctcctctttaaactggattttaaactgggtgtttctttttttttctttttgtgagacagagtctcactctatcacccaggctggagtgcaatggcacgatcttggctcactgcaacctctgcctcctgagttcaagtgattctcctgcctcagcctcctgagtagctgggattacagatgcccgccaccacgcctggctaatttttgttttattagtagagacatggctttacaatattggccaggctggtttcaaactcctgacctcaggtaatccacccatctttgcctcccaaactgttgggattacaggcatgagccattgcgcccagcccggatgtttcttttaaaaatacacactccccacacaaaacaaagactggaattcatttttactttgccaattgcaaattattaaattgcaaacaatccaagataagtgtttcagggtgcccatgatgtttcctcacataggtaagttcccccagtgacatgtacggtgactttttcattattcattcaacatatatttactaagatcctaaggtgtactggctactattttatgtgttgggatgcaaaatctctggcctgtgcagcttaaacttccactggggagagacaagctaaataagaaaattatgcagtatttaaaaagtggtaagtagaatagaaaatgaaaacactacagcaagctaaagcaaatcaggagtaagtggtgaggaggtgaaatttaaatagggtcagcagcttagatctcattaaaaggtgacatcagaggaaaaacgtgaaagaggtgacagagaaatggacaaacagacctagggaaagaaggttccagacacagggcacagccagtgcaaaggctgatggcagaagcaatgcctggtgtggtcgaggctgggcacaggggctgcagagctgagttggggggtgcacaaggaaagatgaggccagagaggcagcaggggtcatgtccagtagtatgttgcgggtttggtttgttttcgtttttggtaagaatcttgctttttctaagaggagtgggttggtattaaagttatttacagtgtcatgatcttactttcattgttagaggatcctctgtttgctatgttgagaagatgtagcaccaaggataaaagtagagagaacaggaggctctcacaatatccaggcatgagaccacagtggcttgatccgggatagaactagtggtgatggagggaaggggtccacttccagatatattcagaaggtagaacaaacagggatctcccgatagattagatgtagggtatggaagaaaggaaggagtcaagcataacttcaaaaattttgacccatgcaagtgaaaggacggggctgccagaaactgagatgaagcaagtccaggctggggagaagagcaggcaatcagtttggaaaacattaaatacaaaatacttcttttaatatatctagtggctagaaccaagtaaattcaaatattctctcagtcatccaaaataattagctatgtacacacacacacctctttgcctgtgaatattctcatttctctgcctaagatgcccttttacctcctttcagtctggcaaacttctaattattttccaagagccaggtcaaaaaccacttcctctgtggtgattttaacaactttcctaggaagaggtagccatggctacctctgttcttcaacagcgtttggtagctgctgaaactccagcacccaacccatactgcactgtaaggttttgcttgcaggttcctctttcttctgaactgaaaatccataagctccaggtgcatggatcattgaggtgtcccctagtgtattaattaggataagtcatgcctgtcatgtacatgtttgctgaatgaataaataaacaatactaatatttgccaccatctttcactttttcaaggcattctgacttattacctcattttctctccataataatcctgagaagaaagggcagcattgtttatgtcagcagggaaaatgaagctcagagagcttgacttgcccaaggtcatgttatttcatggcagactgatctccagccaaagcctcctcctgtctctttgtccagtgctttttccactagaccgtgccacttccactgccacagggtctggtcatgctgccaacatcagcaccctccctgccattacatacatcttgtgtttgggaaatctagaccttgcatggcactgtggcaaaggcttcagcagctcctcaacaattgactactgtctttagttttgatcatgattcataattcctgtcaaaagagcagaggacagtaatggcatcaaattcacaggactggctgggtgtggtggctcatgcctataatcctagcactttgggaggccgaggcaggaggatcacttgagctcaggagttcaaggtcagcctaggcaacatagtgagacttcatctctacgaaaaaaatacaaaaattagccaagcacggtgacatgcacccgtagtcccagctactcaggtggctgaggtaggaaaatcacttgagcctgggaggtcgaggctgcagtgagctaggatcatgccactgcactccagcctgagaaataaagcgagatgctgtctcaaacaaataaaaatacacaggttatatatttttaaaagcataacccaaaatgggacaaggcattatttccaaaagttagttttaaaagatttattcagggctatgcaagccaaaccaaaaggtagaggtaagggtaacttggcttttgtgagtcaagctgttttaagtaccagtcacttctttgcccaacctgtcaaagttttaaagttatcagataggtgcaagttccaaaggttagcaggggagggaagaagacaggcaatgctgctaagaaaggtattcaggattttagtggacagccacttgtgttagcagttgctggatttgtttggatcactgttttgcatggattgtccttacagaatgtttaccgtctcaaccactaaatctttatcctatgtccactatgtcagctattctacaagctttaaaagaggataaggaataaagaaaaggttaatgtcattgatcctttaatatggattacttaaaatgcaattaatggctatttccactgactcttcagagacaagattagaatcctgtaaattatgccaaatcatatgttcttcttgttcgaagaattggtgtaacaagactatggatttctacgaaacagtaagcaggagcataagcataagcatctttgctccaaccctaagtggctagctggaacaatggaggattctcaaagttataaaaaacccagtaaatggacatgttgaaaatttgttgacatactttgagtatttagtgtgcacactgaagaggaaatcgaagtgttctctcacactgcaatacagacatggggaaaaaaagaagcagaaaaactggagtcttgggcgaggtggctctcgcctgtaatcccagcacttcgggaggccgaggagggcagatcacttgagatcaagagttcgagaccaacctggtcaatatgtgaaaccccatctctattaaaaatataaaaatcagccaagtgtggtggtacgcacctatagtcctagctactaggaagcatgagacaggaggatggctggaacctgggaggcagaggttgccgtaagcaccactgcactccagcctgggtgacagagtgagactctgaaaaaagaaagagagagagagagaaagagaaagagaaagaggagaaagagaaagagaaggagaaggagaaggaggagaaagagaaaaagagaaaagaaaaactggactctgtccattttgtgttttggcccaaagataaaataatttcaaccaaacgtttcctgaagtacccataagcaggcctaatcatacttggagcaagagtgcaaatggaggctctctttgttcccacccatcccagtcctgcttctgtgcttctgtgtgtagaatcccagcttgaaggtccaagctttccaagcattgtcttccatatcccctcaactcccaataccttgagattgcacgcccccaccccgcaacccagctacctcctaactacccctccagcctgtgggtgtacacacttgtagcagtcagtcctctgagacccattcaggtcttggatataggctctggctctaagacagggaatcccagggtctctagtacctggatcaaggtctagaaaattgctccccaaagtgtggtttgggagaccagcagcactgttatcacctgagagattattagacatgaacctcacgttgaaatttgatccccaatatgggggattattggccccaattattcaggcctaaaggaaggtttctgggtcacaggggcagatctctagtgaattggctaatgctctcccttgggatgacttttcactgtattagttccctcaagagctggttgttaaaaagagcctggtgccttccccctaccctcttgcttgccttctcaccatgtgatctctctgcacatgggagctccctgttgcctcccaccatgagtggaagcagtcaaggccctcacctgaaactgagcagatgccagcaccaagcttcttgtatagcctgcagaaccgtgagccaaataaatctctttactttataaattacccagcctcaagtattcctttgtagcaacacaaaatggactagaacatcatgtatgtgtttcaaatgtattcctaggcccatccattctgacgaatgagccttcacaaacacacacagtgttatgaagggaacttctggcataatggagtgaggaagttgacaaatactctccctagatagccatcatacaacgggacaaaactgtcaaaaaatcatttgattgctctagtaattgaccaaaggcactcaaaaatctgaacagcatttatttatgacaactattgaactcagggtcacaacagtgagtctgtggcagtgattttgcctgcatctgcttccatcccacaacccccatccccggctctgtcattaggtaattcactcaaccagggcaggacagactgtgaaaaacagcagcttcactgcacctgccaaaggaggctcacttgattagagcattcacagtttaagtttttactggaaagcaaacaagaacaccagcagtttagatagactgaaactgtttgtttggagaaaacaaaaaactagtggatcaatcagagatttatcagagagttccagcaggtaaaccaaacacagagggctagaaaaagtgcttcacatatactgagttgaccagggccacacaaatgtgtagaagagacctcaggggcctaagccacctacatacccatggccaatggaatgtacacacacacacacacacacacacacacacacacacacgacacaagagaggacagctgaatgtaagagctgggagaagacttgaaaatgacataaagtttgaatgtactctccagccacacacaaaaccatgagcagagagtggaagccttattggctggaggtatttgagtccaacttttggtcagttattgactgactactgaactatgcagacacaggggcaaaccttaagaaaccaggctaatttttttttaagtaaaaaaagaaactgagtggagacatcagcaattgcacattgcagggaagacatgccacagatttactacaaacaagttactaaacaaacaatagcaacagctacaaatttctcagggtagagaaaagcagaaaccacagttaccactacatatctaaaatgtcagtagtcaataataacaacaaaaattacgagacaagtaaagaaaaagaaagtgtgactcatacatggtaggaaaaaaaaaactatcaatagaaaatgtccctgagcagtcctaaacagacttagcagacaaagacttctaatcagctattataaatatgttccgaaactaaagaaaaccatgtttaaaaattaaaggaaaatctgatgccaatttctcaactaatagataatctcaaatttttttaaagaaaacaattgaatgggaaattttggagttgaaaagatcgatacctgaaatgaaaatttctctacaggcactcatagcaaatttgagaaggcagaagaagaaattagtgaactagaaaacagatcaacagaaattatctaatttgaaaaacacaaaggaaaaagttttaagaaaaataagcagagtctcagaaacccatgggacaacatcaagcacaccaaataagtaccatggtagttccaaaagcagaggagagggggagaagagtgggtcgaaaaatacttgacaaataatagttgaaaatctcccaaatttgatgaagcatactaatatacagatctaagaagttcaacaaacactagtcaggaacaacagacactgggtcctggctgagggtgaagagtgagaggaggaagaggaaaaggaaaatggttattaggcttaatacctgagtgatgaagtaatcggtacaacaaacccctgtgacacgacttcacctatataataaacctgcacatgtacccctgaacttaaactaaaactctagtaagataaacacagagatctatatctgggcacatcaaagtcaaactgttgagaatcgaaaggcacagtaaatcttaaaagcagcaagatattggccaggggcggtggcttacgcctgtaatcccagcactttgggaggccgaggcgggtggatcacgagggtaggagatccagaccatcctggctaacaaggtaaaaccccgtttctactgaaaatacaaaaaaaattagccgggcgtgttggcgggcacctgtagtcccagctactcgggaggctgaggcaggagaatggcgtgagcccgggaggcggagcttgcagtgagccgagatggcgccactgcactccagcctgggcgacagagtgagactccgtctcaaataaataaataaataaataaaaaataattcgctcacacacgtataccacccttcctctctcccaaccttcaattgcaaaatggatgggctacagagattaaaagattcttcagaagcagaccaaccagttgcaaagtgtgagttttataaagattctgaataagatgtaatgtaaaaccaagaaacaaacaaatgtgacataaatgagagaattttgatattgattagatattctaatatagaaataatttatttttaattttgtttatgataatgatgtgtttatgttccaaagagctgtggcctttaagagatactaaagtatttacagataaagtgatatgccttcaggaattggttgtaggttaatttcttgggaatagattccagattctttatgaatttgcatttattgaagcaaggtcatgaatacaggggagctgattttctattctctctgcttttgcatttaaaaaattttttcataacaaaattttagtaaagatagtatattcagctcactgttcacatcacaatgtttaaaaaataaaacactacaaatactttttaaaaagaaagcagcaagaaaaaaatgactacctacagtgaaatgacaatccaaataatttatgacctcttatcaaaaataaggggaggcaacccttgcatacactgttggtgggaatgtaaattaatacatctgatatgtataacagtttggaggttcctcacaaagctaaaaataaagctactaaaagatccaccaatcccactgctgggtatatacccaaaagaaaggaaatcagtatattgaagagatatccgcattcccatgtttattgcagcactgttcactatagccaagacttgaaggcaacctaagtgtccatcaacagatgaatggattaaaaaaatgttgtactcatacacgatggagtactattcaaccataaaaaaggatgagatcctgtcatttgcaacaacatgggtggaactgaaggtcattatgttaagtgaaatcagccaggcgcagaaaggcaaacatcacatgttttcacttatatgtgggatctaaaaaatcaaaacaattgaactcatggacatagaaagtaggaggatggttaccagaggctaggaagagtgggaagtgggggaaatgggtaggggagaggtggagatggttaatgggtacaaaacaaatagaaagaatgaataagacctattatttgatagcacaacagagtgaatatattcaataataattttactgcatatcttaaaataactaaaagagtataattagatagtttgtaacacaaaggataaatgcttgaggggacagatgttccatttttcatgataagattattacacattgcatgcctgaatcaaaacatctcatgtacctcataactatacacacctactatgtagccgcaaaaattaaaaatttaaaaacaaaacaaaaaacaacggaggcctgaaggccgtagaataaaataatcaaactactgaaagaaaaaaatctgtcaatcaagactatatcccactatgatccttcgaaaacaaagcacaaaaaaaacacatttccatgtaaacaaagattttataaagcaatacttagagcactaaatggagtattcatacatatgtaaatgtaatataaatgacaataatagcataaaagagtgggggaggaaaaggagatgtattgaagtaaagcttttatattttattagaattaagttagtattattctgaagtaaagtaaaataagatgcacattataatgactagagcaaccattcaaaaatagttcaagaaaaaaagaataaaaacaaattactgaaaccaactcaaggagacatggaaaatccaaataggcctataagaagtaaaaaaaaaaaaaattaattaattaattaagaatttaaaatattcctaaaagaaaaattcaggcccagatggcttcactggtgaattctactcttccacaaactttttcaaaaaacagaagcgagaacacttcccaacacaatctataaggccagttttactctggtaacaaaatcagaccaaggcattataagaccagaaaactacatatcaacatccctaaggaacacagaagcaaatatcctaaaatattaacgatctgaattcggcagcacataaaaagcattgtacaatatgaccaagtgggatgtattgcagaagtttaacatccaaaaatcaattaatatactacattaatagaataaatgacaaaaatcacattatagttttaaaagatgcagaaaatgcatttaacaaaatccctttcatgataaaaaaaatctcaacaagctagaatagaagtaaatttctcaactaaataaatgacttctattaaaaaatctacagttaacatacctaatatgaaagggtgaaagctttccccctaagattgggaacaacgtaaggatgtccactcttaccacttctattcaacactgtattggagcttctagttagtacaataaggaacataaaaatcaatggcatcaaaatcagaaaggaagagtcaaaattgtctttattcagagatgacacaaatgtaggaaatcctgagaaatccatttttaaagactactagaattaataaacaagtttagcaagatacaggatgtaaggtcaattttctttctatacatcactaacaaacgatctaaaatgatatgaaggaaataattccatcacaatagcaccacaaaaaataaaatactttaaaataaatttaacaaaaaaatgcaagattttacatcaaaaattcaaagcattgttaagagaacatgaagaaaatctaaataaatagacattaaatgttatgaattggaagatttgatattaaggtagcaattcttcccaagttcatctattgatttaatgtactacctaccaaaatcttagcacttttttccatgaaattaacaagttgaccttaaaatgtatatggaaaactcttaagagaaaacatgtgagtaaatttttgtgaagttgagtgaggagataaattattagatacaacaccaaaagcacaagcaacaaaagaaaaaacaactacattgaacttaacaaaatgaaaaactttttccctcaaagggcatatcaagaaagtaaaaagacaacccacaaaataggagaaacatattcacaagccatatatttgataaggaacttgtatccagaaaatatttttacaaaacaaactcaataatcagaagataaatgactccgttctaaaaaccggcaaaacatttagacatttcaccaaagaagatacaccaatagctatgagaatatgctccacgttattagccattaggggagtgcaagtaaaactaccatgaaataccactccatggtcactagaatggacataataaaaaagacaggcaagccgggcatggtggcttacgcctgtaatctcagcactttgggaggctgaggcaggtggatcacctgaggtcaggagtttgagaccagcctatctctactaaaaatacaaaattagctggctgtggtggtgcatgcctgtaatcccagctactagggaggctgaggcaggagaatcacttgaacccggaggcagaggttgcagtaagccgagattgcgccattgcactccagcctgggtgacagagcaagactccgtcacaaaaaaaaaaaaaaaaaaaaaaggacaggcaatactaaagattggcaaggatgtcaagaagctggaaccctcaggcattcctggttgggaaagtaaaatgatacagccactttaaaaaatagtttggtaatgtcttaaatcagaaatataaatataccatacaagccagcaattccactagtatctatcaaagacaaatgaaaacatagggacacataaggacttgtacgctaatattcatagcaacattattaataatagtctcaaattggaaacagtccatatgtctatccactggtgaatacgtaaactcaatgtggtatctacataccagggaataccactgatacgtgttacaacatggagaaccctcaaaaacattatgctacctcaaagaagccagacacaaaagattctatagtatatggttccattaatatgaaatgtccagaaaaggcatataccttaataaagttgtaaaatatattttacaacaaaatgttgtccatagtaccataattccattttttaatttgggttacatttttttttcattaaatgaattaagccgaggacttaaggaactgatccaacagaaaaaaagttttctacattcatcaaccataccctttataatttgttacaccaattaatttacagtaatcacttcagacacaagaacacagcagtcaacttttccattagttgggttttactcctctgtcagctttcttagtaatgaatggaggctcacttacattcaaagatttcacacttccaaagacaatctaaaggtaactctactgattgctctgctagggagtggctccattttgagcttccctcaaacaaagtatgagcaaaaatgtttagtcacatgaagcctccattttgccagctgcacacttccaaaaatttattcacccaaaggtcagaagcggtgagttctggagttctttatggtgtcctgggaatgcctttcaagtctctggctgctcacaatatttttgtgtgtgctgaactgttatctaaaacgaagtatttcctaatttcagcctactctgagaaccttcagcttttaaagagcttgctgtataaaaaacacaacaggcctctgtaattctacttcaggtgcgatctggacaccatgaagcactgcaaattctctaaggggatgcccgttaatgtcaactggatggttatcttgtaggtttgttgttcttaagcccaaacttaactgttaccatggaaataaaacacaaaaggagttgtccatcctggaaaataaaaacctttagaattctcattcaaggagttaatgttaaatatgggagaaactcttctgcataatgtttttgtgaaaaataaatttttttccttgagaatatgcaaaagttatcttactatgtaacacttggaccccccaacatataaacaaaattttaaaactaataatgtacataattttaaaaattagggtcatttgctttttgcaatcctattgactaaaacagccacaatatcagattgctcaaagaactttagaagcttttttcaattagtcaaggatgcaattacattacctgaatgtgctgtagattagattagactatctacactttcctaaatagcatcttcaggactcagttctctatacaacattccccttagaagtttgggtcataactgtaactctcaccatgcagaagctaaaagtccatttccttgttatatatcatagtaggatgacacagtaatgtgcaggaattacgactgagggataagggtcaaattccttgggttagaatcctagctctgcaacttagcagctatgttattttaatcagctaaactccctaagcctcagtttcctcatctataaaatgagtataatagcataaagcagggttggaaaactttgaccgtgggccaaatctggcctgccgccaattttgaaaagaaagttttacatggccatgcctgttcatttacatagtgtctatgagaatttttggagatatcaaatagcctaaaatgcctacatatttgtactatctcgcccttcatagaaacaatttgctagcttctcatataaagggtttttgtgaagattaaatgtgatcattcattaaagtgttccatataggtaagcaactaataaatggcagggattattgttatttattaatagtaataagttataaaaatcattgtgatctcatttcctaaaattcagagagacaactttacatataatacctcgggagcaggctgcccatacagtaataccttgggatcagtaggctcagccccctttttttgatgaattggtcatggaggtggctgaggtggtatgatcacaggatgtgatgtgcagctgtcagtgcagggcagagagcccggtgagtcacagacagcagctgccacgagtcatccattccaagtaattgatactctgccattctgtgatggaggatctcttggtcacaggtgtataacacatgcatattcgtgattggccccactcctaactgtgtagaggagaccaaagagggagtggggagggctggaattatgcttacacgatgaccagagcaggtgcaggtagccacaacacagcctatttccattttccaggcagtaactggtttcccaagatgtattctgttgtccagaacagggaataagatggggtggtctagtacataaaattctaaaatgtgagtttgatgtaagaaaatatagattaaccattcaaagtagtaaaagctggtgattaccagctggtgatttaccacagaactggcatcactggtcccatgctagtacatctgcaaaatgactttggtcaatcaccaaatatgacagtgttatccacaaatctttcaaactgtccttagaacaccgtctttcaaggcaaatatttaaaagatctaaagagctcatactgaaacagtgatattcagatacaaactatcgcctgtactctctgctcctgtctagggccttaaacatgtcaatcaattttcacctcacttccttgtgtgttaaaaagaagctgcgagaatatgcataataaaaatagccataattcaaaattgtttcctgctggatgttggtagattctcattagttgtagttgctcctgtcaggatcataaataaatttatgtctgtagcacggaaagaacatattcaccaggaggaaacctcaaattggcaaatggtccatgtattaaaatgagatcagtgaatgacacaaactcagaattgtaaagttctcagtgttcatcccaagaatcttcctaccaaacaatctcgttgctattatttaaaacaattagaccttttttttttgtatgtcacagttcattaaatgccatacacatgacattaataggtaaggtcatttccctggaggagctcaccatccaagacagacaaggctgccgctggtgggaatgaagaacagacattcacaccaaatggggagacatcataaaggaccagctgaaatggttttagagttcacagtatattcaaattaatattcaagttgaatcaaagctcttgacaattctgtttctccaaatagacagtggtgctgcctgattatagctagctgcaaaattctccacaatgccatttttaccctgccccactgaaggctgaagttgtctaagagatagctcattcaaggctttgctttcctcagcttgagtaaacatcagcaactgtaacatttttcatgttgaaagaaaccttctgactacacagccttggcacctgtagagacttaaacaaaatatgtgcccttaagttaccaggtgatgaaaatttacacttgatggaggcagcaaagttgcagctgattataatcgaaaaaggtaatcaactaattaaactaccaacttcaaacatttgtccaggtaataaaattaataccctcttcaccactcccagcatctctgtgccttaattcaaggaataactttctaaatagccaattattatatatgtattcctttggtacacaaagtatacagatatagatagatagatacatacatacatacatacatacatacatacatacatagatacaggtgtaggtatagattcagatatagatatagatgatgagatagagagagagagagatagggatacaattggccttctgtatccctgggttttgcatctgtagattcaaccaatcactgatggaaaatatccttaaataaataaataaataaaacaatgcaacaatttaaaataatataaattttaaaacaatatagtgtaagaactatttacatagcatttacattgtaatctagagatgattttaagtatatggaaggatgtatgtaggttatacgcaaatactacaccgttttatatcagagacttgaatagcctctgattttgatatcctgggggtaagggggtggtctgagaaccaatcttccttggatactgagggatgactctatagacatagctatatgacacagaggtatgggaaagctgtattctctttttttttggtaagaaataggtttagaaacagatgaactattattgtattctgtattagtttgccggggctgctgtaacaaagtaccacaaaatggaggcttacacaacagaagtttattatttcacagttctggagacaggaagtccaagatccaggtgtccgcagggttggtcccttccaagggctgtgagagagaatctgttccatgcatctctcctggcttctagtggtttgctggcaacctttggccatttttggtttgtagatctctgtcttcatttccacaggccttcttctactctgcctatctccaaattgcctctttttataaggacactaatcatatatggattggggcctaacctaattatctcactttaactataaagaccctgtctgcaaataaggccacattctcaggcactgggggttgagacttcaacatatgaattttaaaggacataattcaatccataacacattcccatttctaaaattctgtgtcgacagagtccaggtcaataatgattacaatttttaatctccatctcttcactgaggtgcagaggaacagaataaatgcaaaatacctcaactgtatatacaaacctgctcacaagccacactgcatgtatctccctttatttcaaacttctaagtacatgcagtttgtaaactagatgaatttaatatattaaaatggtttcatgctttattggtttatggggttgctagttagtcatgcctgacacacaacaaaattattgactgtccttttcaaaaatatgaatggattatggcttgaaataaaatacaattagatttatggacattgactgcaactgaaaaataaaaagttccttctcagaaggacacactgccgacagctttgctgactcttattttatcatattgactcaacatgactttaacatatatattatcattttttggagagtaaggttataatttgtgttttgagaacagtcctatcctgcagcatcaacaagggtatcaatctccaggctgcagtgcaagaccacttcatttattcaaaatcgagtagccacatgtattgttaagaatacatgatacatacgtatgcctcaagcatgtttttggtgcaaaaaatgtcaagtgcattctacctaataacacagatttacgtcatctttctctcttagcactttcatttcatcatcatttgttacagtcacatacccctgtgatgtagggttgggtggtgacaaagattttgtgttttatctctattttctaaataaagaaaagttacttaagtaacttttccaaagccatgcagtgtatgagctttcttaatctatgtgtagtagcctagttcttctcaaattttaattaatcaaagatgttacataactttttattctaggtgtctctaatatggcaccactgccctgaatccaacccctataacccactaactagttacgaaaggccatgctgtagttcaactcacatcttaagggagaaagttccatttttaaagctacagcatgagagcttctgatctgtttcacaaaccagtctcttcatttttcatttcagttctgtgtgcctcacttctgatttcttcaaattcagagggtagaaagcaatctcagaaagtgcttaactcagtcagtgtgcagccacccagagacctccggaggaaaatgacaagcaccagcttcagacagtgaagggaaaggaaagccacgtgcaaatctggaatcatctgccattagcaaaggtagaaaattatagaggaactctttggggtcacaaggatgtcatttagacctccgcagcagaaattttttaaatagtacccttctggattcaatgatttcacctgcttgctcaagtgcctaatttagaaccagcaagcaaattacaatctacagagtccaggcatgaaattataaatgtttggtttctcatggtctagatctatctatgtcttcaaaccagggctgagaacaaaaccccccaattttccccaacaaagatccacctgacattctgacattttgcaatattcatgtattcagtcattcattcttgcacacactcatttatcaaatttgggggctctcagatacataccaccatgcataatgtgaagagcagctcaggctcctcgcagaacagagcaaggatggtttccgaagttaggagacatggagaaagctgactaagataagcaagggcccccaatgcctggatgactagttatctgcttttctttatcatgcagactcggcccctcaatgttatttagagcaaatatcaaatatttttatacaatcgtatgttctctctgcatttacaacctatgtctttttttttttttgagatggagtctcgctgtgttgcccaggctgtagtgcaagtgcatgatcacagctcactgcaaccttcgcctcctgggttgaggtgattctcctgcctcagcctcctgagtagctgggattacagacgcccaccaccacacctggctcatttttgcatttttttagtagagatggggtttcaccatgttggccaggctggtctcaaattcccgacctcaagtgatctgcccgcccaggcctcccaaagtgctgggattagcatgagccaccacacccagacccacctgtctacctctttactaatttttattcagccttatttgcttaggtttcacttggtatctatttgctctttcaacagagtctctacttagatatttctgaaaaatttttcatgaattgaactttgatacattacagcagctcactcatcatataatccttatgcaaagtgaagaatcctctttgatgtgaacagtcaccccatatgggtttgccaagttcacttctttctttttttttttttttttttttttttagacagcgtctcgctctattgcccaggctggagtgcagtggcacaatcttggctcactgaaacctctgcctcctgggttccagtgattctcctgcctcagcctcccgagtagctgggattacaggcacgcaccaccatgcctggctaatttttgtttttgtatttttagtagagagggggttttaccatgctggccagggcgctcttgaactcctgatctcatgatccgcctactctgtcctcccaaagtgctggaactacaggtgtgagccactgcgcccgaccaagttcacattttcatatgctaactttctcaagctagggccacctgtacataaaggaacaaaacagctggaaaatagagtggatttggctaggaatttaagcatgttacactgaaataactttagctttcaattcttagtaaattcttctcaatacatttcttttaaatgtaaatgtcttatcatatttcatttttgtaaggtgacttatgagttatttctattttatgatgtcaagttactgcaatgacccaaagtactacagtaaaatatccctagaatatttcgtattgagtgctatgaagtggagactattctccattagccaggcaatagccataaaaacttttattcttttccctttctctttctttcaaattttaagctattacctttagaggtaatgagtctgatcatgaactcactccctctctgctgtttaatgaaccccctcatggttttaggacagcagtgaacccttgacatctatttaccttccattataatttcacatcacagtaactgttactagaaacgtaaacataaccatggagttttttaaaccccagcacatctattaaaatgaaatttaccttaaaattcatgaaacacacaaggtatatatcatgattcatgtaaaacacaacatgtcgtgtaagttaatataatcattctgaagtaaattagatgttgttcacattagagtatttattatgttggaatttccatgttactaactgttcaaatattgccatgtcaatgttatttccctaaaagtagaaatattcatttgaatgtactaaatatacatttacaaaaatggcttttagccatcatgctactaacatcagaagaaaagactatgtcgagtcatttaagcagtcaaagatgcgaaagcaaaatttggtgatgtttcaactttcaatttttcagttttcaaatactacaatttttccatttccaatcgcagttttacagaataccaggaagaatttcaaattacccaaaattgctttttatttcacttattataatacattctagtaccctctacctcctagtagctgcttttattattctagtgatgcacacactagaaaacgtttcctactgaaatgttttcaatcagatgctgcctaccaaaatgaatggaaaaccatgtgccatatgaaaaacttcgagagtaaatataagagtgatggactcccaccgggagcagaaagccaaaatcacacttcataaatatacttatctgggaagaaaaaacactggttagacaatatttaggacagatgtatcttgttgcacatcaaaacaatctgtggacaacaccacaacactgcgatgcaattttacaagggaagctggttgggcatttctgtatttattcaactagataatagaggggaaagccgcagaacagtcagaagaatatttgcaatgcaattagggggaacaagtgcatctgagtgagcgccagacacaggggcctccccttaattcacacagtccaatgttttaatgcagcgtacagcagcaaactgaacttcctacagttttaaaacttttgtcagttaactagatgtttaccaagtgcctcgcttgggcactcaacatttcgggtgtgccatccagctctatgtaggttgttccaacaccatctgtcacttaagcttccacagattcacaaatttcaattcgaactaatctactcggcactcaaactgaagctataattcaaatttcaacatgaagcttgaattccttttcagtgttcttcaactttgacccagctcccccctcccttcactgaaaagggccaagacaacagcccagcaagtggggcaggcaaaacaggcctcctttgttcacttttgtcctttcagctctctattgaggtaagggactgaaaaggcacaccaggttttggaaggcagcagcggactcgctcgcaagccatccttcctcaaagaaccaaaaaactccaggacaaaactctttggacaggccactcttaccttaaggcataattaatgggagattagtacttcccctttcccttgagagagaatctgttagtggtgttgaatatgagtctgtaaatgttcatcaaaaatgcatgccataaatcatgccattcaaatgccaaggacatcaaaaagtggcatgaaattagctttaaagttgaaatttggagaaaagatcactacatgctgaatactcatactgaattttttgaatgctctcagcccacttgagaaagataaatcaaattcattgcatattacccagtggaagacctcctacaggattccctcagattgccctagaaatagattttttttttttctggttacagtgggttttgaaccaacacactatgcacataataaaatttaaacatatatatatattcaacatatatatattcaaaatatagtttccagcccttcctaccattatttaatgagaagaatttcaaaaggatcatttttgcctgacagtacctgtcattttcattctcatgtgaattaaaccatgttttagtccagggcaatatggaagaaattcggagagcacataatacaagtaagattcatcattcctgtgttcgaactgaatatgccattaggacagtatgtgagtacaggagcattagtggttataatttgttccctttaccactggcttttttttttttttatcttcactagcttcttagtcacttgatggaaaccctccatcagactgttaaaaattacctttttctaatttgaaattccaatcttgtaggccagtaaaataggtcaattaagttgacaccacatcttttttattagctcagctaagcaattataattgggtggtgaaggtttatgctgtcatcttggaagattcaatggtagggagaaatgcccaatgtggaactataatttacaatgccagtacatccctaaacattcagcataagaatatttctattttcagatatgaggcaaatttgctcttgttctagattaaaataataatgccattttttggcagtaaaaaaagcatatttatttaacttatcctcatagcaaaatcatttagcacaagtgtattacagacataggtactttaattcaacattttagaaaaataccatgaatgtatgccatcaatgctggcttatcctggacttggactacaacacatatgctccacaacatcaatttcttgctttgcacaaagtatgtaatcaattaatacttgttgaaaaccatatacctccatattaataaatgttaaaccaataaattagaaatgctgtgaatgacttgttcagaatatatagatattaatttacagctttaaaagataacagtggctgggcgtggtgactcacgcttgtaatctcagcactttgggaggccaaggtggatgtatcacctgaggtcaggggttgaagaccagcttggccaacctggtaaaaccctgtctctactaaaaatacaaaaattagctgggcatggtggcaggtgcctgtaatcccaggtaatcaggtggctgaggcaggacaatcacttgaaccagggaggcagaggttgcagtgagccgagactgcagcattgcactccagcccaagtgacagggcgagactccgtctccaaaaaaaaaaaaacaaagaaagaaaaaaaaagtaacagtgattgcacttcaaacctattaggatggctattatcaagaaaacagaaaataacaagtgttggagaaaatgtggacaaactggaacccctgcgcattgttggcagaaatgtaaaatggtacagctactatggaaaagagtataacgatgtctcaaaaaaaaatagaactaccatatgatctagcagtctcatttctgggtatataccccagagaattgaaagcagtgactcagatatttgtacatccatgttcatggcagcatcatttgcaatagccaaaagatgaaagtaacccaagtatatatgacatatgaatggataaacaaaatgtggcatatacatacaatgaaatattattcagcattacaaaggaaggaaattctgacacatggatcaaccttgaaggcactatggtaagcaaaataaaccagttacagaaagacaaataaatactgtatgattccactcatatgaggtacttagggtcatcagattcatagactggaagtaggatgtttgttgccaggggctgggggctgaggggttatgaactattgtttaatgtgtacagagttacaatttgggaaggcaaaaaatgttctggagaggtatagtggtgatggctgcacacaatgtgaatgtacttaatgccactgaagtatacacttagaaatagtttaatggcatatcttatgtcatatatattttacaataaaaaacttagcaaaaacattttttaaataaacatattgcatttgctgccccatttaaagacaacctgataatgaaggatttacagttgctgacgctgaaggctgagccattcccctatttccttcctcaggtagccttcaattttaagagaaaaaataaaaatttgtcaattcattttggtacatcttcctattcttagaaacttcagtcaaactcatagaagcagagagtagaatggtgattgctagtgggtaggggaattggggagatgagatgttctcaccacacatacacaaattaactgtgtgaggtgatagatgtgtttattagtttgattgtggtaatcatttcacaatgtatacatatatcaaaatatcatgttgtacatattaaatgtatacaacttttacttgtcaattatatctcattaatgctgtgggggggggaagaaacttcagcctttgatcccaatagaggctgttttaaacagaaggagcttttcatttgccaaggcagtaaaatgtttaagtaaaataagtcactggatttttgcccttagcatccagttctctcctctgtcctcacctgccaggaaggttcctggaagggatgcttcaggtagggaagcataaaattttaagggaaaagcatatctaaatgtatttagtaattttcaaatcacttcctcttcatcaatcattgcaacagctgaagactgaagtaaagcagtcttttgattcaaatgcacaaaacttcctaaagaatatgttagaagctctacattccagttaaatttgctatgggttaccgagcttctcagatggtaggtactctttgaaaatgaggatgagattccaatagctgctgatctatggtgagaatataaggaaaaagcctcagtgcctcagtggttaccctttggggtgagtaatgactggaagggaccacaagagggctttctcagatgtgcattacactgttccttgatctgagtgctagttaagtcaatgtgttcagtttgtgcaagttcatcggctatgcatttgtgatatgtgaaaaaaactctgtgtgatgaagtatgtagctagatgataaaattagaattaatcttcccaaggacagatattctgtttggtcaccactgtatccccactgcctggaacacagtaaatatttattaaagaatgaaggaatgaatgaatgaaatctttttaacggaaaagcttcctgtagagttccattcaacagctcctatgtacatacacaatataatatctgtagagtctatttatattcaatctgttacacagggaaaattacacctgcatgaaagcattatttgaaatgattcttgaaattttctacagcccaggtgtatacattctcaggaccccctcacacttctgaagcacttacacctagcgattattgccatcattgttgtattggcctcacaggaagtactatttccaaagatgctttgctttctattcactgttaccgtagcattaacaaaaatgatgtggtgtaagggcaatggccttcagtccaaagacctcatcactaccctgcattacgaggctgagccctattgcagttgttttgaaactcgaaggattagttagatacaatgttgcctgagtcctctaacagctctaaaattcctggattatgtaaaatgtttagcaactttcctgtaataaagtaaaaagaaggttgaaacaagactatgagtcagtaggattatgaatgcaaaataaatcaatttttccaattgatcagttaattataattctaaaagctattccagaaatagctgattccactttggttcaaattttccttttttactagttaacatggagcatcttcataaatgcccccacatgtttctatatatttaggaaatagaatgatttcctaagattggatgctagggtcctattcaaactcaacatccaatttgaggagtaactcatttgcagtcaaaaccgtgtacaaaggacattcagggctggggaccttttctttaaagaaaaaaaagttttatgaaactttatgatgtgccaggaacatctatgtaatcacagaggccctggttactaagaacatgttgttcagtgactgtaatgggttggattgtgggttaacagccacgtacttaaaagctaacaggaataaaagaatatgtaaaggagttacatgggaataaaaggctattccacaatacagttctctgaatcacaatattgcctgctactgtgagttctgcagagctccgaattaaatgggcttgtaatgtatctccctggttttgaacactcagtggtttaggtttcccctaaactgataagcctccaaaaggccacagtctcagtcttggattgtaaagcacaaggacaaaaacaatcccactcccctacttcctagctgtgtggccttgggaaagttacttggtttctctaagccttcatttcctaatttttaaaatggggttgctgtgagaattaaatgagatgatacatgtaacatgcgcagcgcccagcacatctaaagctctcaaaaccggttggctatcgttaccattaaagcagcaagtatcagttgcctaactccatttcagtacttcagcaagtactgccattattacaatattttaacagcagggcatggttagcacaatgcagtcccataaagcagcccagcctccgaggtttgtattcagaggttactgtgttcctttccaggaccaccccagggggagctcctggtgcacaaccaatgcttcctgcctcattacacttggctccatctcctcctgcaaaagcctggggcgaggaagagcccagtctcttagacccgcacttctgagcgttaaccatctgggactcggaaaggaaaagaaagctttcttctcaggacagttctgcgccggtggtagccaagggctggagcccctgatgcgaagaaaagggaaggagagaggcggggtgcgaaagaaacgccaccgctcggcgccctccctcggtgcccgcggcgcaggggccacccgccagcgtacgggggacgaagatgtggccgcgggcgcgggcgggaggggaggcgatccggggaaggaagcggcctgttcgccagccccggggcccggggagccctccagcagcgcttgcggccctgaggacaccgctttgggagaaatgacgactcccttgctcaccctactgcgacaccccgtccccctccgcactctagcagatgcgggccgggagtagctgagctggccaaccgcctgggaccaggatgcggcagcgcccacccgcgcggcgtggagggggccgggggcggcgctcggcgcagatggcgctcgctgcgagatggatgctccagggcgggtaatcactcctggctcaacacagcatcccgggcggagcggatgccagatcccaccgctaagagcctgggctgggaaagcaatctttccaggcagcccccagcccggtgcgccggccccgacaagtcccagccctcggaggcagggcggggcgcagggactcccgggacccgcacctgtaaggccgacaaagcccccgcaagcgccccacccctctgtcctccgtgtctctctcgttccgcctcgattccccgagccctctccaggcagcgactggagaagcgaagtcggcctcgcccccgaactccgtggtcagcacaggtgtacgcacttccgaacaaagcccacgcccagacgtgtccgcaggggcccgaacaggcacacgcccgtgcgctcccggcccggcccccgcgctcctcgccccgccggcactgtggcgtgacgccccgcgcctccgtgtccaagcccgggaagccgccgtgccgggcccgcaggctctccatgcccaactgcccacgagcaagagctctgggcagggcttcccggaaagcgtggggtgcgggcgcggagcagaagttggccacaggctggagggggtggtgggtgccggcgctgctggatttcagctgtgccttcacccaagcgcaggtccccctgctccctctcggcgcccgcgggagtgtcgggggcctgcaggggagaagggagttggagatctgctttgcccctcctgcagcgctgccagcccggtgagcgctcggctgaaccccgcggcggtgtccaagtgacaacgcagcagcctcgcgcgtcctcctccgctccagccgtcacccccgagcaggacccagtgtcaccgccagacgcgcaaggagctacttacgttctcgcgccgcgccctccgctcagctctggcgcgactgcccaggaccctggaccgccggtgtcctccgttctcgacgaagctatcccctctggctgctccagccaggcggcccctgcgccgtcccccgcgcccgcgcgtctgaggctcggactgcggcgcgcgtccgccagcgaccctggcgaagcgaggctggccccgcgccggcgcgcgcccccgccgctcccgccctctccgctccccctccccgcgccgtgcttttgcccctcccggctctccttagcgtcctcccgtccccctcccccgcactccctgcgggcgtcctccgcctcctcccctcctggccaaccccctcttgccctgctgctgcgacggcagcgaatgggctccagccgccggcgcctcgagggactgggtggcccctcacctgagcggccgccccaccgccaacctccgtcagcctgcgagcgcgtgtggcggcgggggtgggggtgcggggacggagggcgggagtgttccggggctaggatggctgggatttagctacaaaagatgttccagaaaatgggtagtttttgaatgccactctcatgggtttagctttctgtgggaggtctgtggtcttctagttttttcttttttaaaaagcactttcttcgaaattcatcagttggggtggttgagattgggtgagtggttttgggggttttgttttgtttttgcaaccgttctttccaaacactccccgccgccccccaccaccgcagaaaaaagagcttttagcataaggcggatgctatctatccgcggtagaaactgggtcttctggtcccaaggaatagggttagttcggatttgcttatttacaaatgggggagtattatggagattttttttttttttttttggcaatgtaaatcgagaattaagattttccaactgtatagtatttgagtaaacacactgcttgctgcatagttcaggctccgaagcgcacgtctccactctatcgtggatggtgttcaggatccttagcctgacccttgggtcctccgtaatctactccggtctgcacacaaattacttgtctgctgggtatcacccgacttgaccacttacagcaggctccagcgcttagtgagctcagcggagccttgattccttcagttctctaattcaggaaaacattttctgagctcctcaccaccccaccccacctcaccacctcctccacccccagcctccaaggtgctggggcaagattcaggaatgaaaaagaaacaggttcatccttcaaggtcttgactaccccagtggtctgttctaacttcaatttgaacttgccccgtcagctcacagcatctgcatgcaagtgagcagccttcttttccttctccttctactgccatcctctcctccttctccagccaaatgtgctctggcctcacagagcctccctcggttcctgaaccagcatgatatctggctgctgggtcattgcacaagttgtttccacagtcccatcagtggttcttctgactctagtccttacccaactgccattcaggtggtaccttgcacctctcaactaattgtccaaattttcctctaaaataccttcccccccgcaaaaaaaaagattccatgatccccct
